United States Patent Application Publication US 2020/0377945 A1 - sequence listing, part 18

SEQ ID NO: 3576 - DNA, 153240 bp, Unknown
  gut microbiota DNA sequence
gaagccctgtttaggtgtgggaagttttagttactgattattaaaaatacggattttatctatgaattatataaagataatttcaatataacaagttttgataaaaaatatatggttagttttatgaatagaaatgatcgtaaggcagaacatttaattataacgaattattagagcgtataagtggtttccacttcactggacaacccgcctacaatctgctatattaaacaaaaagagcctgcaccccacaggccaattctgaagcataaaggagaagaaaaacaatggcaaatccagttgttactatcatcatggaaaatggtgatgtgatgaaagcagaattatatccggaagtagcaccaaacacagtaaataactttatcagcctggtaaagaaaggttattatgatggcctgatcttccacagagtcatccgtggatttatgatccagggcggttgccctcagggaactggtatgggtggcccaggttacagtattaagggtgagttcagccagaatggttttaagaatgatttaaagcacaccgagggagttttatccatggcaagatccatgatgcctaactctgctggctcccagttctttatcatgcacaaagatgctcctcatctggacggcgcttatgcagcatttggcaaggttacagagggaatggatgttgtaaataagatcgcagaagagcgcaccgattattctgaccgtccattaaagacacagaagatcaaatctatgacagtagatacttttggtgtagaatacccagagccagaaaaatactgatagattgccggtgatataacggaaaaacagcagtaaatagtaaaaaacggttcttacaggagacagaacaatatgaagcaggagcggactctttcaatagaaggaaaagaatatacgcttctcatatctgacgaaccacaggcccttttggaggcaaaagcttccggaagggctgttttaggttgtctggatacgggaaatggggagggagcgagcagagattttcaggggatcccttatgtagttccctcaatggaatatgtgacagaagaacttttagaactgatcctgcgccggtatctgggacttccgtggcttattgacgagacagagcgactgtacatccgtgaatttgtaaaagaggatgcagagaacataccagaagaagaatatggtaaggaagaagagatattccgtgatccggacaaattagaagtatatataaagaaccagtatggtttttatgaatatgggacctgggctgtgttaaagaaaagtccgtcgcttctcatcggcatggccggcgtcagtaaccccaatcttccggaaactgctttgcaggcgctacccactcttccagacgacctttgctggctggaactgggataccatatttttaaaccttacaggaaaaatggctatgcaacagaagcagctaaagccattctttcttattcccacgaagtcctttctgccagactctgcgcctggattgaagcaaaaaacaaggcctcctgcgcactggcagaaagccttggaatggaagtagtaaaagttatttctgatcaaacagccactggatggcccggagcgtatcttctgtatgctgagaagatgcaataactgccagatagggcggctggatcgagacaccggtcatatcggaaaatgcagtaggttccagtgaaatagcggcagcagttgactgccctttttcattgtctgtatagaagaaaaggtcttctttttcggcacgttctaacagatcctggggcaggaattccttcagatctaaaaatgcgccctgggactcataatgttccagtgtctttgcatcagcgatgataatatccaggtctcctccggctgctaaagcagcaatctttgccatacttgcataggaatattcggaagactgggagccatcagcattgataaacagtccggaattgatctcgatcagatccttcttaccaaaaccaagagcttcttttaagctgttttcaaatctatccatagatgactcaccgccggaacggtcattgacaatggcgaaagtaagccgtgtggtaaaggtctggcgatacaggctgcttcctactacccataaaagggtaaatgccagaatgacagctacaatatgaaatttataatattcataaatataccagatccggtctttcccggacatttgttttattttctcaagttcactttttatgtcttttttcagttccatgatgtattcctttcaggttgacgtctggatttttctgcgctcattacactacagtatagctgaaaatgcagatacccgcaactactcgttccatttttacacttaatatgatacaatgtaatgagcgcagtggaaaataagcggctgcgtaagcagacatttattttacacaagccattaacgaaggttccgcctgcgaagcaggcagtagagcacgtcagtgcgtggacctgagtatatagaaatgagcgcagtggaaaataagcggctgcgtaagcaggaaagaagaggataaaatatgtttcagggtctttttaattatgataacccggtgtggcgttttataggaaaactgggagatctggtacttttaaatcttttgtggctgatctgctgcatccctgtatttacagcaggagcagctactacagcggtatattatgttaccttaaaactggtacgtgacgatgatggttctaccatcaagtcatttttccattcctttacccagaactttaagcaggcaacagcgatctggctgatgatccttgtagctggcggattgctgggatttgatctgtggtttcttatgtcaggagtggtaactgtatcaacggttgtaaaaacagtgatgtcagctgtatttggtgctatgacattgatcttgctgtttgttactacttatatttttccattacaggcaagattttataacacagtgaaacgtacattatttaatgcatttttcatgtctgtgcgtcatctgctccagaccatttccatgctgatcattgatggtcttgtagtagcaggagtttatgttgctctgtatatggtaccacaggtatcgatgctcctgcttttattcggatttccgctgattgcttttatcaattcctacttttttacagagatctttaaaaagtatattccaaaggaagaggatcaggaacattcaaatggaatttcacctttactggatgaaaacaatcaggagatcgaggatgcgatccagagcttaaaaggaaaataaaacagatcatacgaatatacacatcaaagagggcttaaacagtcctcttttttttacaataggaaagttcgacttccgtcgaactcttgataaaaagagcccgcacaaaggcgggcatggcaaacagacgatagattaaaagaagtcaatgtaaaagccttcttcaaattcatcgtcatcaagatcgtcatcttcggtaagaaaatagtgcatatccaaaaggtcagagtctgtcatgtttttgaccaggctgggtgtcattccctctggaggattcttggtgtatttttgcctaagtttctctataagctttgcatccatagtttaaattccttcctgtctgttgatgagtttagtatgatacagacaggaagaaaaatcaagcagagcggaatttgactttagccattgttctttcataaagttcttgtagagaaacccgtttgtgacgatagtagacttctaccagcgccatttccttcttgcagtgaggacagaataaaggatcatatccaaaagataaaagaatgtcctgtctccatttcgtaaaactttttatgaagcggtgtttcgatttgtgaatagcacgataaagtttagtgtcaatttcacggtgcctcgcatagagaccatagtagcggatcattttaaaatgtttttccggtatatgttggataagaagtttaataaactcgattgccggaatcgtacgtttaacataagtattatcttcgtgacgattatagtgaaaagtaacatttttaccatcgtaagaatcaatccgttttaaggcaataaccggacggccaagatagcggccaatgtatttaatgacagtattagggtcgcagagattaggcttggcatagacataaaagccgtttttgtccttgtgatagatataagctttaatctttttgaaggaaggtccgatgtgctgttccatttcattgagtaaagcggtttgaaaagcattgcgtagataagtgtaattgaaatgttttaccggccgccaaatagcattgtcagaaaaaccgccttccgaaagaatgggggatataaaacagtctggccctttgagtatgcgaaggaaaagatccagtatccggcacggtacagcaggtgatcttcagcttaattttttttaatatttttttaatgttttcactcttgaaaaatgagacaaattaatgtatacaatattatgtattatgacatgtcgccattttttgaagaaaaatgagtggattacgaatgttttaggattgcgagaacacaaagtgcggagcaatccgttggtatcagtggaattaacggaattgagaaaaaaggggatagcagctatgatcacacatttacgcctgaaggcatatggaaagataaatctggcgctggatgtactggggagaagggacaacgggtatcatgatgtccgcatgatcatgcagactgtaggacttcatgaccggatcgaactttacaggacaaaggagcctggtatccgtctggagaccaacctgttttaccttccaaataatgaacaaaatctggcttaccgggcagccgctcttttaatggaagagtttggtgtaaaagaaggtgtttccataaaactgaaaaagttcattcctgtatcagctggaatggccggaggcagtaccgatgcagctgcagtcctttttggagtcaataaaatgtttggcctgggcttaagtataaaagaactgatggaacgtggcgtaaagctgggagcagatatcccatactgcctgatgcgtggaaccgctctttccgaaggaattggggaagaattaactccgttgcctcagatcccccagtgtcaggtattgatcgcaaaaccggggatcagcgtttctacaaaagtggtttatgagagcctggatgccatggagctaaagcaggaagatcatccggatattgacggcatgattgaagcgatcaaccgccagaatatccatgagatagccggaaaattcggaaatgtgctggaactggtaacagccggtaaatatccggtgatcggtgagatcgagcaggtgatgaaagaagaaggggctgttaatgccatgatgagcggaagcggtccaactgtatttggtctgtttaccaatccacaggcagcacagaatgcctacgaaaagcttcgctatggtgatgcttccaaactggcaaagcaggtatatctgaccaacttctttcatgtaaagcggagcagatagaaacaagcagatcgtaaacataaaaatatagacaaacagacatagataaaacacagaaaggaatggtcttgagatggaaaataattttaaagtcaatatgaacgaatatctgcctcttcgcgatgttgtatttaatacactgcgtcaggctattttaaaaggagaactggctccgggagaaagactgatggagatccagctggcagaaaaattaggtgtaagccgtacaccgatccgtgaagccattcgtaaactggaactggaaggtcttgtacttatgatcccaagaaaaggcgctgaggttgcaaagatctctgaaaagagccttagggatgtgctggaagttcgccgttccctggaagaactggctattgaactggcttgccagagaatgaccgatgaagagatcgaacagttaggggaacgccagaacgactttaagaatgccattaataagggaaatgccatgaacattgcagagacagacgaggcattccatgatgtgatctatctgggaaccggaaatgataaactggtacagatcttaaataatttaagagagcagatgtatcgctatcgtctggaatatatcaaggacgaggataaacgccagatcctgatagtagagcatgaacatatcctggctgcgatcaaagcccgcaatattgcagaggcaaagaatgcagcaagagaacacattgataatcaggagatcactgtttccaagaatatcaaggagcaggaagatatcatgcctgtccgcggccgtggaagaagatagcggaaatggcattggaggagaagataaatggaagaaaataaagtagaagataagacagaaaagaccttcaaagagcgctatcttgcaggagagatcgaatttgaagagatcgatcgctatatcagccgttggaacaacagcgatgatgagcgtacactggctgtttatctggggttaaatgcagatgaagaggacgtatggatcgatgaaagcgacgaagctcttcaggagatgttggataagcagaaagcctgaaattaagccttctgcttaaaaagctgttttgcagcatctaaaagtccaaggtgcagttccggccttggagcagtttcaaagaccagggaatagctttcagaagctgtttcatctatatctgtatgataagaatttgtaaagcaaagaccgggatagaggacgcaccaccagttgcgtccttttcctttgcctatagtgatccgtgcagcgtcatagtaaccgcagggaaagaaggcatttccataggtccttgctggaaaatggtcatggctcagattaagatccacatccgcttcacagccggagtctgccagggtctgttctgccttaaaaacgacctcttccttatgagaaagaagccaggaagccagctcttcttttccggcatgatccggggcattttcacggatataggaaagaacctggtcccggacttttaattttaattcctggtccgtttttgaattgctttccgctaaaatgtgaaaacgcagcacataaggggctatacggctggcatctgcctcctgcttacaggtgttggcagaaactgcaatgagaaaagcagtaaaaaagcaggcaagagaacaaataagccatttgtggcgataagatacagatttcatggactaaaacttcctttctggattttgagagaacatattttctatttgtatttattgccacatatgctatactgtaaacggtaaaatctaagaaaagaaagattttaaagatttctggaaaagggataagtgaggagatataaaaatggaaagaaaaacagcagcagtcattttcggcggacagtcatcagaacatgaagtatcctgcatgtctgcagccaatgtgatcgaccgcatcaacaaagaaaaatatgacctgcttcttattggtattacattagacggacactggatcaagacagagtctgtagaagagatcagaagcggtgagtggagaaatggaaaagtttccgcagctatcttaccagatgctacaaagaaatgtgcgatccttatggatggagataaagtaacagaagtaaaattggaccttgtattcccggtacttcatggacttcacggcgaagacggaaccatccagggtcttttagaactggcaaagatcccatatgtaggctgcggtgtactggcatctgcagtgggcatggataaactgtatacaaagatcattgtaaataacttaggcatccgccaggcagattatgagcctgttatgagcgagcagttagcagatatggatgctgtaacagcacgtattgaagcacattttgcataccctgtatttattaagccgtctaacgcaggttcctccaagggagtcagcaaggcagaaaacagagaagaactggaagccggcttaaaagaggctgcaaagcatgacagaaagatcctggtagaagagactattattggccgtgagatcgaatgtgctgtattcggcggcggaaaagaagaagtgaaggcttccggtgtaggcgagatcctggcagcagcagacttttatgattttgacgcaaaatattacaatgctgagtccaagacggtaacagatccagaacttcctggaaatgccacagaagaagtaagaaaagcagcagttgctattttcaaggcagtagacggatacggactttcccgtgtagatttctttgtaaaggaagacggagaggtagtatttaacgagatcaataccatgcctggatttacagccatcagtatgtatccaatgctttgggaggcaagaggcgtcaacaaagaggaattagtagacaagctgatgagccatgctttagagcgtttctaagatcacaggtttacgtaaaaagaaaagaggagttacatgacaaaggatgtactgatcaccatccgcggtgtccataccatggatgaagaggacaatgatgtggagatgatcgtccggggagattactaccagaagaatgggaaacattacgttctctacgaagaactgttagaaggttttaaagaaccggtaaagaatatcatcaagatcacgccaacctctatggatattacaaaaaagggaacagccactacccacatgctgtttgaaaagaaccggaagaatatttcctgttacagcacccctttaggtgaaatggtagtagggatacaggccaatcactttgcagtagatgagcaggcagacagcctgaaggtgaatgtggattattccctggatattaattatgagcatatgtcggattgccgcattttagtagctgtgcagtcctgccagtagaaagagagggcgccccgcatccgcagggaaatgcacctcatcaaaacaaaaaacagccgctcccatccgggagccggctgtttttttacgccccatattatgcatctttacggaatcttgcgaaaaatccctttttctttggcggagttggaatggaacctccgcggacactcttgatctgggtgatgtagataccgcttaaaactaccttagcttctgttttaacaggaaggcattcaaacactcttgcatcagcgatcagtgtaacgatctttggtccgatctttgctttcacaaccggaaccttggtccagcgcatgtactttggagtctggtcaactaccatttttggaagacctgcctgagtcagcttcagtttcttcttatcaataacaagaagagatacggtctgtgctgcggcatctaacatctgctgctgttctaactggcgcttctgaagcttatttccaaggaaatacaggatagccaggatgacagctgcaatgatgaggatcaccagcagtatgtttaaaacggtatttaacataaggtatacctccgaactgtagtatagttcccgtgggcttgattagacatgccccaagacattctaatatagtatatcatttgtggtaaaaaaaagcaagaaaaaattcttgacaccttgacaaatatatgttattatggagagtgcattattgtggcgtcctgggcttattgcgcccatttgctgacgcccgattaccgagaacgacagcagtggaaaaaggggcagaaaaagaaagaaaaatccccgaaaaagccgctgcaaccaaataagaaaacaggggtgaaacgtcaatggagaaaagcagaatacgtccggtaccggccgggaaaagcgtaagaatgagctattcaaggcagaaggaagtccttcagatgcctaacctgatcgagattcagaaagactcctaccagtggttcttagatgaaggactgaaggaagcgtttgctgatatctctcctatcgcggattttgcaggacatttaagtctggaattcgttgactttacattgtgcagagatgatatcaagtataccatcgaagagtgtaaagaacgggatgctacttacgccgcaccgcttaaggtaaaggtcagactgtacaataaagataaagatgaaatgaatgaacatgagatatttatgggtgatctgcctctgatgacagataccggttcatttgtaattaacggtgcagaacgtgttatcgtcagccagcttgtacgttcccctggtatttactacgggatcggacatgacaaggtaggtaaggaactgtttacatgtacggttatcccgaaccgtggtgcatggctggaatatgaaaccgattccaacgatgtattttatgttcgtgtagacagaacccgtaaagtaccggttactgtactgatccgtgccttaggctacggaaccaacgcagagatcttagatctgttcggcgaagagccaaagctccttgcaagctttggaaaggatacatctgataactatcaggatggtctgttagagctgtacaagaagatccgtccaggcgagccgctgtctgtagatagtgcagagagcctgcttaacagcatgttcttcgatcccagaagatatgacctggcaaaagttggacgttataaattcaacaagaagctgtcctttaagttccgtctgaatggacaggtactggcagaagatgtagttgataccactacaggtgagatcattgcagaagctggtacaaagttagacaaagagtctgctatgaaggttcagaactccgctgttcctttcgtatgggtagaaggcatcaacagaaaacagaaagttctttccaatatgatggttgagcttggcgcttatgtttcctttgatccggaagaagttggtgtttccgaattagtatattatccagcacttgctccgatcctggaaaaagcaggtgatgatgaagagatgttaaaggaagagatcagaagaaatatccatgatctgatcccgaagcatatcacaaaggaagatatcttagcttccatcaactacaacatgcatctggaagagcaggttggtacttctgatgatatcgaccacttaggcaaccgtcgtatccgtgccgtaggtgagttattacagaaccagtaccgtatcggtttatcccgtatggagcgtgttgtaagagagcgtatgacaacccaggacgtagatggtatcacaccacagtccctgatcaacatcaagcctgttacagctgctgtaaaggaattcttcggaagttcccagctgtcccagttcatggatcagaacaaccctctgtcagagcttacacataagagacgtttatctgccttaggtcctggcggtctgtcaagagaccgtgccggattcgaggtacgagatgtacactatacacactatggccgtatgtgcccgatcgagactcctgaaggtcctaacatcggtctgatcaactcccttgcaagctacgcaagagtaaatcagtacggctttattgaagcaccttaccgtgtggtagataagactgacgcagcgaatccaaaggttactgacgaagtcgtatatctgactgcagacgaagaggacaacttcattgtagcacaggcgaatgagccgttagatgaagaaggacacttcatccacaacaacgtatccggacgtttccgtacagaaacttccgagttcagaaagagcaccatcgacttaatggacgtttctcctaagatggtattctctgttgctacagccatgatcccattccttcagaacgacgatgcgaaccgtgcgctgatgggatccaacatgcagcgtcaggctgtgccgctgttaagtacagaagctcctgcagttggtaccggtattgaaggcaaagctgccgttgactccggtgtctgcgttgttgcaaagaatgcaggtgtggttgagcgttccgcttccaacgagatcatcatcaagagagactccgatggaaaccgtgatgtatatcacttaaccaagtttaagagaagcaaccagagcaactgctacaaccagaaaccaatcgtttataagaatgatcacgtagaagccggtgaagtaatcgcagatggtccttctacctgcaacggtgagatcgctcttggtaagaaccctctgatcggctttatgacctgggaaggttacaactacgaggatgcggttcttctttctgagcgtctggtacgtgatgatgtttatacatctgttcatattgaagaatacgaggcagaagcacgtgataccaagttaggaccggaagagatcacccgtgacgtacctggtgttggtgaggatgcattaaaggatctggacgagcgcggtatcatccgtatcggtgctgaagtccgtgccggagatattctggtaggtaaggttactccaaagggagagactgagctgactgctgaagaaagactgttaagagccatcttcggtgagaaggcaagagaagtacgtgatacctccttaaaggtacctcatggtgcatatggtatcatcgtagacgctaaggtatttacaagagaaaatggtgacgaacttgcaccaggcgtaaatcagaccgttcgtatctacatcgctcagaaacgtaagatctctgttggtgataagatggctggacgtcatggtaacaagggtgtcgtttcccgtgtacttcctgtagaagatatgccattccttccaaacggccgtcctctggacatcgtgcttaacccactgggcgtaccttcccgtatgaacatcggacaggtgctggaaatccacttaagccttgcagctaaggcacttggatttaacgtttccactcctatcttcgatggcgcaaacgagaatgatatccaggataccctggagcttgcaaacgactatgtaaatactccatgggaagagtttgaagctaaatataaagataccttaagacctgaggtaatggattaccttggttcccacttagagcacagaaagctgtgggaaggcgtaccgatcagccgtgacggtaaagtacgtctccgtgatggacgtaccggcgagtacttcgacggcgcagtaaccatcggacacatgcattacctgaaactgcatcatctggtagacgataagatccatgcacgttctaccggtccttactccctggttacacagcagcctctgggtggtaaagctcagttcggcggacagcgtttcggagagatggaggtttgggctctggaggcatatggtgcttcctacaccctgcaggaaatcatgactgttaagtctgacgacgtagttggccgtgttaagacatacgaagctattatcaagggcgaaaatatccctgagccaggtgttccggaatccttcaaggtacttcttaaggaaatgcagtccctgggtctggatgttcaggttcagagagaagatggtaccgaagtagagatgacagagagcatcgactatggtgatacagaactgcgtgctatgctggaaggcgaccgtcattacaatgacagagagtcttactccaattacggatatcaggagcaggaattcaagaacaatgagcttgtgaatgtagaatccgattccaaggaaactaacgacgattatacagacgacctgtatgacgcatatacagatgacagtgagaacgaataatagaagggagtataagctcatgccggaaacaacaaatgaaacttatcatccaatggcgtttgatgccattaaaataggtctggcttcccctgaaaagatccgctcctggacacacagaactccggagcctgcagataagccaagcaagcagtggaaagactggtgggagcagggtgcagtacgcaaccgtatgcctgagccttcaggcgctccttccaaggagtggaaagactggtgggatcacggcgttgtaaagaagccggagaccattaactatagaaccttaaaaccagaaaaagacggacttttctgcgagaggatcttcggaccgagcaaggactgggagtgccattgtggaaagtataagaagatccgttacaaaggcgtgatctgtgaccgctgcggcgttgaagttaccaagtccagcgtcagaagagagcgtatgggacgtatcgagcttgctgctcctgtttcccatatctggtacttcaagggcatcccaagccgtatgggtctgatccttgacatttctccaagaactctggagaaagttctgtatttcgcttcctatgttgtactggatccaggtgtaacaagccttcagtacaagcaggtattatctgagaaggaataccgtgaagaagtagagaaatacggcagcagcactgcattccgtgtaggaatgggtgctgaggcgatccaggagctgttaaaggccatcgacctggaaaaagattccgcagagttaagaaagcagctgatcgatgcaagcggccagaagcgtgcaagaattatcaagcgtctggaagttgtagaggcattcttaagctccggaaaccgtcctgagtggatgatcatggatgttatcccggttatcccaccggatatccgtcctatggtacagctggatggtggacgttttgcaaccagtgacttaaacgacttatatagaagaattatcaaccgtaacaaccgtctggcaagactgttagagcttggtgctcctgatatcatcgttcgtaacgagaaacgtatgcttcaggaagcagttgatgccctgatcgataatggccgccgtggccgtcctgtaacaggacctggaaaccgtgctcttaagtccctttccgatatgttaaagggtaagcagggacgtttccgtcagaacctgttaggtaagcgagttgactattccggacgttccgttatcgtcgttggtcctgaattaaagatctatcagtgcggtctgccaaaggaaatggcgatcgagctgttcaagccattcgtaatgaaagagttagtagcaaacggtactgctcacaatattaagaatgcaaagaagatggttgaaaagcttcagacagaagtttgggatgttctggaagatgttatcaaagagcatccggttatgttaaaccgtgctcctacactgcacagacttggtatccaggcattcgaaccgattctggtagaaggtaaagctattaagctgcatccacttgtttgtacagcgttcaacgccgacttcgacggtgaccagatggcagttcatcttcctctgtccgtagaagcacaggcagagtgccgtttcctgctgttaagcccgaacaacctgttaaagccatctgatggtggtcctgtagccgttccttcacaggatatggtacttggtatctactatctgacccaggaacgtcctggcgctaagggcgaaggcatgatcttcaagagtgtaaacgaagcaatcctggcatatgagaaccaggaggcaactcttcattccagagttaaagtaagagtcaataagacaatgccagacggcactgttaagactggtgtgatcgagtctaccatcggacgttttatcttcaatgagatcattcctcaggacttaggctttgtagacagaagcattcctgaaaatgaattaaagctggaagttgacttccacgtagctaagaagcagttaaagcagatccttgaaaaagttatcaatgttcatggcgctacccagactgctgttacactggatgatattaaggcaattggttacaagttctctacaagagcagctatgaccgtatctatttccgatatgaccgtacctgcaagcaagccgaagctgatcgctgacgctcaggcaactgtagaccatatcgcaaagaactaccgccgcggtcttattaccgaggaggagcgttataaagaagttatcgaaacctggaagaccaccgatgatcagctgacccatgacctgttaacaggactggataagtacaacaacatcttcatgatggctgactctggtgcgcgaggatctgataagcagatcaagcagttagctggtatgcgaggactgatggcagatacaaccggtcacaccatcgaacttcctatcaagtctaacttccgtgaaggtcttgacgtactggagtacttcatctccgctcatggtgctcgtaaaggtctgtccgataccgctcttcgtaccgctgactctggttacctgaccagacgtctggtagacgtatcccaggatctgattatccgtgaagttgactgctgcgaaggcaaagagatcccttacatggagatcaaggctttcatggacggcaacgaagtgatcgaggacctggaagagagaattacaggacgttatattgctgagaccattactgatccggatacaggcgaagtagtgatcaaggctaaccatatgtgtacaccaaagcgtgcagcagcggttatgaaggttctgaacaagatgggacgtaaatctgttaaaatccgtaccgtattaagctgtaagtcccacattggtgtgtgtgctaagtgctacggcgcaaacatggcaaccggacagcctgtacaggttggtgaagcagttggtatcatcgcagctcagtctatcggtgagcctggtacacagctgaccatgcgtacattccataccggtggtgttgccggcggcgatatcacacagggtcttcctcgagttgaggagctttttgaggcacgtaagccaaagggtcttgctatcatcactgaattcggcggtgtagtagacattaaggatactaagaagaaacgtgaaattactgttactgatatggaaagcggcaattccaagacctatctgattccttacggatccagaattaaagttatggaaggccagatccttgaagccggtgatgagctgactgaaggtagcgtaaacccacatgatatcttaaagatcaagggcgttcgtgctgtacaggattacatgatccaggaagttcagcgtgtataccgtctccagggtgttgagatcaacgataagcatatcgaaatgatcgtacaccagatgttaaagaagatccgtatcgaagagagcggcgacagcaatgttctcccaggtgtatccatggatgttcttgacttcaacgagatgaacgaagaactgatcgcacagggcaaacagcctgcagaaggcaagcaggtaatgcttggtatcaccaaggcatctcttgcaactgattccttcttatccgcagcatccttccaggagaccaccaaggttctgaccgaggctgctattaacggtaaggttgaccatctgatcggtatcaaggagaacgtaatcatcggtaagccaattcctgctggtacaggtatgaagcgttaccgcaacgtaaaactggatacagatgacagacttcttgcagaagacgatgagatctctatgtcagaagatgatgagatagcactggatggagccgagaaatctgaaatctctgaggataatgtagcagaagaagttctggacatggacgaaaacgaagatgcatctgaggatgatgacgagaccgaagagtaataaaaaataatgaaaaactggtccaagaatggagcagaataaaagatacgggagtccggctgaaaaagctgcggctcccgttttttatatcttcaaaaaagcatagccaaacattttgcaaaaaatctactgtcaaatatttttgcaaaaatccacttgacagattttttcaccatgctataataagaaagtgtgtgcaaagcgctttgctctttgcataacaacaagctgaaagacacagcaaccaacagtcaatatcacaggaggtgaaaaggatgccaacatttaaccagttagtaagaaagggaagacagaccagcgcaaagaagtctaccgcaccagctctgcagaagggttataactctttacagaagaaggcaacaaacgtatctgcaccacagaagcgtggcgtttgtaccgctgttaagactgctacccctaagaaacctaactctgcacttagaaagatcgccagagtacgtctttccaatggtatcgaagtaacaagctacatcccaggagaaggtcataaccttcaggagcacagcgttgttctgatccgtggaggaagagtaaaggacctgccaggtaccagatatcatatcgtaagaggtacactggatacagcaggtgttgctaacagaaagcaggctcgttccaagtacggcgctaagagaccaaaagacaaaaagtaattaaaatttaaaactggaatcactaacagcagtaaagtgactgcagtcagttaatactggactgctttgttgtgccggattgtgatattgaacctgtggttgcaggaaaatatatagaccgcgcacgaacacattttatggaaacatgtgagtaccgacgagttaatgtaaacctgctgaggaaatgtttccgaagcagcatattaaggagggaagtaacgtgccacgtaaaggacatactcagaagagagacgttctggcagacccaatctacaacaataaggttgtaaccaagctgatcaacaacatcatgttagacggcaagaagggtgttgcacagaaaattgtatacggcgctttcaatcgtgttgctgagacaaccggaaaagacgctatcgaagtatttgaagaagcaatgaacaacatcatgccagttctggaagtaaaggcaaaacgtatcggtggtgctacctatcaggtgccgatcgaagttaagccagaaagaagacaggctcttggacttcgctggatcactctgtactcccgtaagagaggcgagaagactcaggaagagagactggcaaacgagatcatggatgcagctaacaacactggcgcatctgtaaagaagaaagaagatatgcataagatggcagaagcaaataaggcatttgctcactaccgtttctaattgcagatttccctttttcacaattttaaggaggaaaatcccttggctggaagagaatatccattagacagaaccagaaatatcggaattatggctcatatcgatgctggtaagaccacactgactgagcgtattctgtattacactggtgtaaactataagatcggtgatactcatgaaggtactgctaccatggactggatggctcaggagcaggaaagaggtatcaccatcacttccgctgctactacctgccactggactctgcaggatcactgcaagccaaaggctggagcattagagcatcgtatcaacatcatcgataccccaggacacgttgacttcaccgttgaggttgagcgttccctgcgagtactggatggcgctgttggtgttttctgtgcaaagggcggcgttgagcctcagtctgagaacgtatggcgtcaggctgatacttacaatgtaccacgtatggcattcattaataagatggacatccttggtgcaaacttctacggcgcagtagagcagattaagacccgtctgggcaagaatccaatcgttttacagctgccaatcggcaaggaagatgaattcaagggaatcatcgacctgttcgagatgcaggcttacatctacaacgatgataagggcgaagatattgctatctgcgatatcccagaagatatgcaggatgatgctgagttatatcacaccgagctgatcgagaagatctgcgagctggatgatgatctgatgatgcagtatctggaaggtgaagagccatctgtagatgaattaaagaaagcattaagaaaggcaacctgtgagtgtacagctattcctgtatgctgcggttccgcttatcgtaacaagggcgttcagaagcttctggatgcgatccttgaatatatgcctgcaccaaccgatatcccatctatcaagggtgtggatctggacggcaacgaagtagtacgtcattcttctgatgaagagccattcgctgctcttgcattcaagatcatgactgacccattcgttggtaagttagcttacttccgtgtttattccggttccttagcatccggttcttatgtactgaatgctacaaaggataagaaggagcgtgtaggacgtatccttcagatgcatgcaaacaagagacacgaacttgatcgtgtatactccggtgatattgctgcagccgttggtttcaagaataccacaactggtgataccatctgtgatgaacagcatccagtaatcctggagtctatggaattcccagagccagttatcgatatcgctatcgagcctaagacaaaagcaagccaggataagatgggcgacgctcttgtaaagctggcagaagaagatcctactttccgtgttcgtaccgacgaagagactggtcagaccattatctccggtatgggtgagctgcatctggacatcatcgtagaccgtctgctgcgtgaattcaacgtagaggctaacgtaggtgctcctcaggttgcttataaggaaacatttactaaggctgttgatgtagacagcaagtatgctaagcagtccggtggtcgtggacagtacggacattgtaaagttcacttcacaccaatggatccaaacgcagaagaaaccttcaagttcacttcttccgttgttggtggtgctattcctaaggaatatatcccagcagttggcgaaggtattgaagaggcttccaagaccggtgtacttggcggattcccagttctgggtgtaagcgctgatgtatacgatggttcttaccatgaagtcgactcttctgaaatggcattccacattgccggatctatggcattcaaggatgctatggcaaagggtaacccagttcttcttgagcctatcatgaaggttgaagttaccatgccagaagaatacatgggtgatgtaatcggtgatatcaactcccgtcgtggccgtatcgaaggtatggaagacatcggcggtggtaagatggttaaggcatatgttccgctgtctgagatgttcggttactccacagacctgcgttccagaactcagggtcgtggtaactactctatgttcttcgagaaatatgagcaggttccaaagaacgttcaggagaaagttcttgctgatcataagaaatgataaaatctaaaaaaggcttgtaaatcaaggtgaaatatcatataatgattgatagcctgacattaactatattagccccacacatatacaggggcgcaaattaaggaggacgttataaaatggctaaagctaagtttgaaagaactaaaacccattgtaacattggtaccattggacacgttgaccatggtaaaactactctgaccgctgctattaccaaggttctggcagaaagagttgctggaaacgcaaaggtagacttcgagaacatcgataaggctccagaagagagagagcgtggtatcaccatctctactgcacacgttgagtatcagaccgagaagagacactatgcacacgttgactgcccaggacatgctgactacgttaagaacatgatcactggtgctgctcagatggacggcgctatcctggttgtagctgcaactgatggtgttatggctcagactagagagcacatccttctgtcccgtcaggtaggtgtaccttacatcgtagtattcatgaacaagtgcgatatggtagacgatcctgagttacttgaattagtagacatggaaatccgtgaactgctgaacgagtacgagttcccaggcgatgatactcctatcatccagggttccgctctgaaggctctggaagatccaatgggaccatggggcgataagatcatggaactgatggatgcagttgatacctggattccagatcctgttcgtgaaacagataagcctttcctgatgcctgtagaggacgtattcaccattactggtcgtggtactgttgctactggtagagtagagcgtggtactctgaacctgaacgacgaagttgagatcgttggtattcatgaagatacccgtaagactgttgtaaccggtatcgaaatgttccgtaagctccttgacagcgctgaggctggtgataacatcggtgctctgctgcgtggtgttcagagaactgagatcgagcgtggacagtgtctgtgcaagccaggttctgtacattgccatcacaaatttaccgctcaggtttacgttctgaccaaggacgagggcggccgtcatacacctttcttcaacaactatcgtccacagttctacttcagaacaactgacgtaactggcgtttgcgagttaccagctggtactgaaatgtgtatgcctggcgataacgtagaaatgactgttgaactgatccatccagtagctatggagcagggacttcgtttcgctatccgtgaaggcggacgtactgtaggttctggtagagttgtatctatcatcgaataattttacagattttatatataagtaatacaacatgtctgaatggacattatgctcaaacgattcggctcccggaattacttccgggagcttttttgcatgctgcatatggaagatgcgctggtgtagtttgtttcctaccttcggatgggaaaaatatatgaatgattggggataatgggaaaggtggaagggatcgtatgtacgaaaatatgtatgaaaagatgatagcagtgaccaaccggcatctggtgttggaaaatgatacagatggggcatatttaaagcagcttacctatgttgcctctcttcatccaaaagccatggtactgcgggaaaaggatctgacagaagaaaagtacgaagaactggcaaaggtggttattaagctgtgtgagaaggcggaaactacccttattttgcaccgttttccagaggtagtacatcatttaggatatgataagctgcatctgcctttggaaatgcttaaaactataggacggccggaaggacttacacttcttggtacttcgatccattctgtagaagatgcgaaagaagcaggacgtttaggtgcagactatgtatttgcaggaaatatctttgagacagactgcaagaaaggacttccgggaagaggtctggaatttcttgaaaatgtatgtaaagaagtggatattccggtatatgccatcggcgggatcacagcagaaaaaatgccccagatccttgggaccggggcagcaggtggttgtatgatgtctggatttatgcagttgaaggaaaaataaaacgttgtttttgcaacgaaattaagagctgcctgatttatagtaatcgctgtatgttggataactgtgtgatctgatcttcgttcatgacagacagctggttgatcagttctatatgataagtaccaagaccttttgcagcattggcacattcaccggcacagtctaatgtgatcgcagcgaggatgcaggcagtgagagcatctgtcacagccagataagtacctgtgatgcaggtgagcatgcagccggtgccggtgacttttgccatattgggagaaccattgtagatgccgtatgtggtatctttatttggggaagcaatgatatctacttcaccggtaacaaggatcacagcgcctgtctcttctgccagctttctggcaatatgggccatagaatgtacggtatccggatctttggcagttacagcgtcagctgcacttacatctacgccagtgccatgaaaggcagcgcctgcgattgcacgtatctcagagccattgcctttgatcacagctggcttacattctttaataaaacgttttgcaagttccatgcggaaagggctgcatgtgatccctaccaggtcgatcacagaggctctttttgtattttcagcatctttcattcttttgatggcttttcctgccagaagcatggactcagcccttgcatctgtaatatttccaaggctgacggtaagggcagctgcgctggcagaaatgtccgccacttctgcaggatgttctgccataatagggcgtcctccaagggccagaactgcgttggcacagtcgttgaccacaatgggatgtgtgatgcagtggatcagcggtgcctggtcatgaagttggtcacgaacctgttttaagcaggaaaggagctgagctttatttatattaccattccgattgtccatgagatgatctccttataataaaaacgctgcagcagaaccatgcaggcctgttacagcgtttattttgcaatggatattttttgcacatgtatgcacatcaggcatgtttcttgtttgtattccagtataccactgccattgcaacaaaggcaaggagaacaatatatttgatgcttcctgcaaccggtccaggttcagcaacgaactgttttacggcaactgtggaagcaagataaccgataaagcctaaaaatgcaattcccagagagtcattcacaaccgtatctgtattattgtagacctgagagcctaaagcagtctggaatgtggataacatatgggctttctgtaaatgctttaagaaaatgaaagcaaggctgcctccgatcagtgtacctgcaataaaggatggcacatagaagaaccaggtaagacctgtacgtccccagatcagtgtcataacaggataagaaacaatagcgccgatgatgccggttccaatgacttcaccgatgaacgcacataccagtttgcctttggaaaggcggtagagcataccggaaagaaaagcgccaaatactgcaccggtcagagccagaggcgggatacccatacataccatacggatgatgccaatagccagagcgcacacgaaagcataccagggaccaagcataaccgcacaggttacattaataaaatgggccataggacacattccttctacacgaaggatcggggagatcacgactcccagagctaccatcatggcaagaaagacaagtttcgttgcatgtgtttttgaatttttcatatcgtttacctctcctcattctggctgtatgtggaatggggtgttttttaataaaggccttatgaaaatggcaataaaaaaacgcacccacacggcgcgtttggcaaatctctgttaaaaaatagacatagcgatggcgccgttttacagctgtaattggcggtcgatgctcactagcatcctctcaatccgaaacacggagtcccatcgcttctcttttgtacgcagtgtcagggcgctccccctcacaccgtctcagcccgaaagcagatacaaaaggtctaaaaatattataaacggagagaaaaaaatgtcaagagcaaaaccagcctatgactgaacagtaaccttttaaattaagataatgtaataaaaacgtaattgaaaatataagttagattatgtatgatgtaggttgtaaaaaatctgacagaatatgggaggcagaaagaatgaaaaactataaaagatcaggagctgcaggtttcctttgtgcagcggctctgtttcttggaacgggtgttcttgccctggggaccagtgcatttaatgccctggccgcagaagtttccggacagatcacatcctgtaagataaccgatgataaacagaacgttgagatcgctttaaacagcagtggcagtacagaaggaaccgatggcaaggtgtatgtgttcgagcagcctacctaccaggatgatctgggaagccgcagcgactatcttacttcggcaaatgcatccggcgccactaccgttaccgttccttttaacaaaggagatggttccgactgcctttacagcaaatttgtgctggcagtaaaggaagatggtacttacaaggcagtcagcgaacctcattatattaccaatcctgagatcgtggcaaagaatacagaagcttttaaggaacctttgacaaaaaagggcttaaacattgagctgaacatgttggatgatgcctttgacctgggtgtaaagtatgtgaccaccaatatcgcagtttccagattaatgggatccggtattgatttccagtatgagggcaagacttatcattttaacaaaggcattgtagaagattatgataaggtcatcagcgcttattccggaaaaggaatggttgtaaatgccatcctcttaaatgactggagcgatacgacctccaatctgtttattccaggggtacagaaaacctccagtgcatattattacatgtttaatgccaccaatgaggctggttttgagcagttaaaggcaatttccgcattcctggcagatcattacagcggcaagaatgccaattacggaaaagtttcaaactggatcattggaaatgagatcgaaaaccaggaatggaactacatggggcctatggatctgaccaattatgtgaagacctacgaaaaggcattccgtgtatgctacacagcaattaagagtaccaatgcaaatgacagagtatatctttcccttagttataactggatgaatgaaatggatggccagttaaaatacggcggaaaagagatcattgacagttttaactccattgccaataaccagggacagatggaatggggactggcttatcatccatatccatgtccgctgatcgatcctgtattttgggatgacgcccaggcaacaggactggttaaaaatgactttaattcatcggtcatcaactttgccaacttaaatgtgctgactgattatttctgccaggaggcattaaagacaccgtccggtcatgtgcgccacattatccttacagaacagggctttacagcttacagtccgaccaggggagatgttccggagcttcaggcagcagcctttgcttattcctattatctggtagacagcaacccatatattgatgcttataccttaagccgtcaggtagatgctccttcagaggcaaaagatggactgaaattaggcctgtgggagtgcgatatgagcaagccaaatctgatcgaagctacaaagaggagaaagatctggcaggtattcagggatattgacaaaaagaactctactttagaggcaagtgaatttgcaaaatccctgatcggtatcaacaagtggtccgatgttgtacctaactttaaatggaaaaatctggaaaagtaaataaaggttgatcaaaacactgcaggagaaaaattacttctgcagtgttttgtataaagacaaataatgttatatgtactggacaagcggacaaaaaaaggctaaaataagaactgactttttagaaaaatgaagctgctttaagcagaaatagatacaggaaggaaaatgaaaatggggttgatcgtacagaaatttggtggtacctctgtagcagatacagagcgtcttcgtaacgtagcaaggatcatcactgatacgtacaaagcaggaaatcaggtagtggttgtgctttctgctcagggtgacactacagatgatctgattgaaaaagcaaaagaaattaatccggaaggttccaaccgggagatggatatgctgttatccacaggagaacagatctccgttgcactttgtgccatggctattgaagcattggggtatccggtggtttctcttaccggctggcaggcagggatacttacagatacggcagcaaagaatgcaaggatcaaaaagatcgatacagagcgtctggaggcagagctggaccagaagcggattgtgatcgttaccggtttccagggagtagacagaaaccagaacatcactacactgggaagaggcggttctgatacttctgcagttgcactggcagcagcactggaagcagacctgtgccagatctacacagatgtagatggtgtatacacagcagacccaagacatgtaaagggcgcaagaaagctggatgaagttacttataatgagatgctggaactggcaactttgggagcacaggtgcttcacaaccgttctgtagaactggcaaagaaatataatgtaaaactggaagtattatccagctttaccggtcatccaggtacaaaagtgaaaggggtagcaaaacgcatggaaaagacagcagtcagcagcgtagcaaaagataaagatattgcaaggatcgcactggtaggagtgccaaatgaagtaggaacttctttcaaggtattctctttactggcacagaaccacattaatgtagatattatccttcagggcattggccatgaagaaggaaaggatatctgcttcacagtagcagaaggagatcttaagaaggcagcagagctgttagagtcccacaaggctgaactgcgttttgcaagactggagacaaacgcagatattgccaaggtttccgtagtgggttccggtatgatcaacaatccgggtgttgcagcaaagctgtttgaggcactgtatgatgcccacattaacatcaatatgatctctaccagtgagatcaagatctctgtactggtagataagaaggatgcagaccgggctgttcaggcagttcatgataagttttttgcattttaaataaaaataaaagcaatagagcagacaaaccggattaacggttatgtctgctctttacttttatgcaaaaaatggatacaatattaaatatgattgtgggagcgcaaagcgcggaacaatccggtatcagaaaaaaataaaagtcaggggagaaactatgtatacttgtgcaaaatgtaatgtattagcatgtggatcgcaggatccggctgtaagagagaaaatgccaaaaaactgtcctatgcgggaaaaagaaaaaatggaaggggcttatgagaaatatgccttagaggaaaatcacgaattttatgtaagttgttctgagatcgaaggggaaggctattgccaatggccgagattaaaagaaacagtggaattttgtaaaaaaatgggttataaaaaaataggactggcattttgcaggggactgcgaaaagaggcgcgtgttgtggcagatctttttacagcccagggctttgatgtggtatctgtgatctgtaagaccggtggttttccaaaggagtcggtaggaattccgaaagaaaagaaggtcaatgcagatgcatttgaaccaatgtgcaacccaattgcccaggccgaatttttaaattcccaggaaacagagtttaacattgcgctgggactttgcgtaggacatgactctatgttttacaaatattccaaacaaatggtgactacactggtggcaaaggaccgtgtgctggcacacaatccatgcggtgcgatctactgtgcggaaggatattttaagaagagattacagtagcagtttatgccagaatatggttttggtggatctggatcttggagacttgaaaagtgaggacagactaaatggaatatattggaaataagaaaaagcagggcagtattgtagaacttctgcgggatgagatattggcgggaaatatacctgatggcagtgagatgacacagaatgagctggcagaaagtctgggagtatcccggatgccggtaagagaagctctgatcttgttggagtatcagggattgatcgatcgtctgcctaataatcatgtgcgggtggcatctctcacagaagactacttccgccatattttaaaaacaggctgtagattagaacttgaatttttacagaatttagaggaagaagaacgaagcagtcttcctgatagggaattgaattttcacagggagatctggcgcaactacccttacagtctttccagaaaaaatctggagacgataacggagatctacctttattttgttatatccagacggaacccggaaggtgtctggggaaatgtccaggagaaaacagaggaagagatcttattaagtaagagtatagaaaactggaaggctggaaaaacagaagaaggagccggacagttagaggaatattttgaaaaaatggcagtgaaactggctgctatccataaggggagggattaaagagttatggttacattaaaaccaattaaattgctgcctgcaagggaacgggtggcttctgcactgcgaaaagccattatctcaaagcagatcggtgaaggagaagttattacactggaagcaactgcccagcagttaggtgtatccgttacaccggtgcgtgaggcatttcagatactggcaagagatggcctcattgacttaaaacagaacaagggcgcaactgtccttggtttaaatgaaacaaccataagagagcactatgaaataagagcggcgcttgaaagtgcggcctgtgtgctctgctgtcagagaaaagcagatctttctgctataagaaactgcctggaaatggcagatgaggcactggagaaaaaagattccagcagttattctaactataaccagtccttccactatgagatctggacagcagcaggaaatgaaaagttaaaaacaatgctgtctgaaatgtggaacggtctttctatgggcttaaagtccacagaagaagaatacgccagaaattcccaggaagagcaccgacagatcctggcagcccttgaaagcggggacccgaagcaggcgggggagaagatggtatttcatattatccgaagcatgaatgatgtactgacaagatactagtaaaaagatatgacttccccgctggcagcggggatttgttatatatgcacaataaaatatcaaaaagaatatgcagaacgctgaattggtaaattactattgacaattacagcgttctgttctattataaaaacatgaaatggatacattattaaatataaaatatcaaatataagatataaaataaaaataatggtccaggacagcagctgcaaaacataagtgttctgactggcaggcgggacaccggttacaaagtaccttaaaaaatgaataaggtttatacagttatataaaaccgaagggggagtttatgagtccatcaactataaccatcctgtttctcttgtttgcaattgtaatgtttgtaatggagaagatcccgctgggggtaacatccatgatcgtctgtgtaggtctggttgttactggggttctggatgcgaagacggcatttgccggttttattgacagcaacgtaattctctttgtggcaatgtttattgtaggcggtgcattttttgaaacgggtatggccaacaagatcggcggtatcgttacaaaatttgccaaatccgaaaggatgctgatcgcagcagttatgatcatcgtaggtgtgatgagcggcgttctttcaaacactggtacagcagctgtactgatcccggttgtgatcggtattgcagcaaaatccggttactcccgttccagactgctgatgcctttggtatttgcggcagctatgggcggcaacctttcactgatcggagcgccgggcaatatgatcgcccagagtgctttatcagagatcggacttagctttggattttttgaatatgccattgtaggacttccgatcctgatctgtggaacacttttttataccacacttggtatgaagcttttaccggacaggcagccaaaagatgacggggcgtttgataccacagttgattacagcaatgtaccggcctggaagcagaagctttcactggtgatcctgttgcttaccttactggctatgatctttgaaaaaaagatcggcatcaagctgtatgtttccggatgtatgggagctctggcactgatcattaccggtgttatctctgaaaaacaggcattaaattccattgatttaaagaccattttcttattcggtggaaccctttcactggcagcagcccttgaaaaaacaggtgccggtgagatggtagcagagaaggtaatgcacctgttaggtgaaaatccttcaccttatgttttaacttttgcagtatttatgctttgctgtatcatgacaaactttatgtcaaatacagcaaccacagcacttttagttcccatctgtgtttccattgcacagggaatgggagcagatccaagagccgtacttatggcctgcgttatcggtggctcctgtgcttacgcaacacccatcggaatgccggcaaacacaatggtacttggagcaggcggctatacatttttagactataccaagtcaggattgccgctgatcgtgatcgcaactgtagttagtatgatcattttaccgatcgcatttccatttttcccgtaagttgttttatgggaacatgaaataaaagcaataaaacaaacattacatattattaagacaattcaaaacatattataaggaggcttaaacatgagcagaacagaacaggtagagcagcttaccaattatatggcgcactttgttgcccatatcggtaagaaactgccagatgacattattgccaagttagatgaactggcagaaaaggaagacagcccattatcaaaagtaatttatcagaccatgaagcgcaatcaggatctggcagtaaaattgaaccgtccttcctgtcaggatacaggtgtccttcagttctgggtaaagtgcggaaccaaattcccgctgatcgatgatctggaagcactgttaaaagaggctgttgtaagagcaacggtagacgctcctttacgccacaacagtgtagagacttttgatgagtacaacacaggcaagaacgttggcaagggaactcctactgtattctgggatattgttccaaacagcgacaaatgtgagatctacgcatacatggcaggcggcggttgcacccttcctggaaaagctatggtattaatgccaggcgcaggatacgaaggtgttacccgtttcgtactggatgttatgacctcctatggtttaaatgcatgtcctccactgttagttggtgttggtgttgcaacttccgtagagacagcagctcttctttccaagaaagccctcatgcgtcctttaggaagccacaatgaaaatgagagagctgcaagtatggaaaaacttctggaagacggaattaacgagatcggccttggaccgcagggtatgggcggaaagtactctgttatgggcgtacatattgaaaatacggcaagacatccatctaccattggcgtagcagtaaacgtaggatgctggtcccatcgccgcggccacattattttcgataaggaccttaactatacaattacaactcattcgggggtgactttataatgttagagatcaaagatggaaagaaaattttaacaacaccaatcagtgacgaagatttaaaagatatccatatcggtgacattatttacttaaatggtaacttaacaacctgccgtgacgtagctcaccgccgtctggtagaagaacacagaccactgcctgtagatgtaagaaacaatgccattttccacgcaggccctatcatccgtcctttaggagatgacaagtttgaaatggtttccgtaggaccgactaccagtatgcgtatggaaaagtttgagaaggaattcgtagagcagaccggcgtaaaagtgatcgtaggaaaaggcggtatgggaccaaacaccgagtacgcatgcaagaactttaaagccatccactgtgtattccctgccggaaacgcagtagtagcagcaactgaagtagaagagatcgtccgtgcagagtggcgtgacctgggaatgcctgagaccttatggaactgccgtgttaaggaattcggaccactgatcgtatccattgatacagagggaagaaacctgtttgaggaaaataaggttgtatttaatgaacggaaagaaaaagtttacgaagagatctgcaagcatgtaagctttatcaagtaatgtaatgagtgcgcaataaaaacctgccatctctcctgcggcgtagtgaaaacgactcgcggcaggagcggtggcattttttgccttaaaatttgttaataaaccatttttaataaaaggaaacacttgccatttgacaaaaatatcactataatataaacggcaatatttctgtattttataagaaagcgctatttttatgtgctttccgctaaatactgtaaacttaagaatgatggaggactggaaaatgagtaattcagcacaaacttcagcaagcagccgtattgcagccctgcttgatgagaacagttttgttgaagttggagcctatattgcggctagaaatactgactttaacatgactgagcaggaaacaccggctgacggtgtagttaccggttacggtaccatcggcggatgcctggtatatgtatacagccaggatgctgctgtactgggcggttccatgggtgagatgcatgcaaagaagatctgcaacatctactctatggcaatgaagatgggagcacctgttattggtctggtagactgtgcaggactgcgtcttcaggaagcaactgacgcactggatggttttggaaagctgtatttaagccagacaatggcatctggagtaattcctcagattatggcaattttcggtacctgcggcggcggtatggctgtatctgcaggtatggcagatttcaccttcatggaagatacttctgcaaaactgtttgttaactccccaaatgccctggagggcaattacaaggcaaaatgtgatacttcttccgctaagttccaggcagaagagtctggtctggttgatttcacaggtgatgaagcatctgtattatcacagatccgtacactggtatctatcctgccttctaacaatgaagaagatctgtctgaagttgactgcacagacgatttaaaccgtatgtgtgctggtatcgaaggatataccggagatactgctgcagctttacagatgatctctgataataacttctttatggaagttaagaagaactacggcgcttctatggtaaccggatttatccgcttaaacggaagcacagtaggatgtgtagctaaccgcagcgaagtttacgaaaacggtgagaaggtacagaccttagaggcagctctttgcggaaaaggctgtgagaaggcaactgatttcatcaatttctgtgatgcattcagcattcctgttctgactttagtaaatgtaaacggctaccgtgcaactatgtgcagcgaaagaaagatcgctaaattagcagctaagctgacctacgcatacgctgatgcaactgtaccgaaggtaactgtcgttgttaagaatgcactgggaagtgcaggtcttaccatgggcagcaagagcctgggcgcagacgttgtttatgcttggccaaatgcagtgatcggaactatggatccggcagaagctgttaagatcatgtatgcaaaagagatcgaagctgcagatgacgcagttgcaatgatcaaagagaaaaccgctgaatataccgctatgcagtccggcgctgttgctgctgcaaagagaggttatgtagatgacatcatcaaggcagaagagacccgtcagagagtgatcgccgcttttgagatgctgtacacaaaaagtgaggaccgtccttccaagaagcatggcacggtttaaagagaggtgacatgtatatgagacgatttgtaaagagaatggcagcagcagttcttctgtccgcctgcctggtaagcctttctggctgctcctctaaccaggatacagcagagactgattccaccatcagcatggacggaactcctgtagatgattcaatggctcagtccattatgctgtctgcagcacagactttaggcgtaccaaaggatcagctgatcgttcagaaaactctggcagagtcaacaggcgatacgactacagcagctatttatgaggctcagctggaagttcgcgaggatatgggcgaattaaagaatgtaaacatggatgaaggttctgttgttcttctggcagatggcagctatacggttgtgatcccggttgactttacagagggaaccaagaaatatgtgatgaacatcaatatggctacccagcagatccaggctgagtttacagatatgtccgcaggcgttgtagaagatacttctatgggtgctctgttaaagacagctactgtatacaccattattggtatcggcactgtattccttgttttaattttcatcagtatcctgatctcatgcttcaaatacatccatgcatgggaagaaagcaagaagaaagcagcagcacctgctcctacaccaaaggcagcagcacctgctgttaagccagtagcagcagcaccggcagtaaccggtcctgatctttctgatgatgcagaattagtagctgttatgactgctgctattgcagcatatgaaggcagcgctacatctaacggtctggtagtacgttctatccgccgtgtaggtctgggaagataatcactgcacattcaggttagaaaaccagtgtgcttatacaacaagtaggaggaaacaaactatgaagacatataccattacagtaaatggaaaagcatatgcagtaaccgttgaagaaggcgcagcagcagctggcgcaccagtagcagcagctccagttgcagctccagcagcacctgcaccagcagcagctccagctccggcagcagcaccagcaggcgcagcaggttccgttcaggttaccgctccaatgccaggtaaggtagtagcagttaaggcttctgtaggacaggctgtaaagaagggcgaagttgtcctggttctggaagctatgaagatggagaacgatatcgttgctccagaagatggtacaattgccagcattaatgtagcaaacggcgatgcagttgagtccggcgctgttttagctactctgaactagtcaacaagatggatcccttaatttaaggattccattatggaggtaacattatggattttggcaatttggtatcaaacctgcttggccagatggcgtttttccatctgtcagcaggaaactacattatgatcggtgtagcgctggtcttcttatacctggctattgctaagggatttgagccgctgctgttaattccgatcgcatttggtatgctgcttgtaaatatctatccggacatcatgtattctccggaacagacttcaaacggcgtaggcggtctgctgtattacttcttcactctggatgagtggagtatccttccgtccctgatcttcatgggcgtaggtgcgatgacagacttcggtccgctgatcgcaaacccgatcagtttcctgatgggtgcagcagctcagttaggtatttactctgcatatttctttgcaatcttattaggattttcaggaaaagaagcagcttgtatctccattatcggtggtgcagacggccctacttccctgttcctttgcagtaagttaggacagacccagatcatgggaccgatcgctgttgcagcttattcttatatggctctggttccgatcatccagccgccatttatgaagcttcttactactgataaggagcgtaagatcaaaatgtcccagcttcgttctgtatccaagctggagaagatcttattcccgatcatcgttactatcgttgtgtgcctgatcctgccatctactgctccgttagtaggtatgctgatgttaggtaacctgttccgtgagtgcggtgttgtaaaacagcttcaggagactgcttctaatgcaatgatgtacatcgttgttatcctgcttggtacttctgtaggtgcaaccaccagtgcagaggcattcttaaatgcaactactatcaagatcgttattttaggtctggtagcattctgtgtgggaaccatcggaggcgttctcttaggaaagatcttatgcaaggtaactggcggaaagatcaacccactgatcggttctgcaggtgtatccgcagttcctatggcagcccgtgtatcccagaaggttggcgctgaatatgatcctaccaacttcctgctgatgcatgcaatgggaccaaacgttgcaggtgttatcggtactgcagtagcagccggtacctttatggcaattttcggtgtataaaaaccaacatttactgcacccggtgctgtttgcagaccgggtgcctataaggaggatttaaactatggcagagatagagaagaagccagtaaagatcgtggaaaccgtccttcgtgacgctcatcagtctttacttgctaccagaatgactacagagcagatgctgccgatcgtagacaagatggacaaagttggctaccacgcagtagagtgctggggaggcgctacatttgatgcctgcctgcgtttcttaaaagaagatccatgggagcgtttaagaaaattaagagacggctttaagaatacaaagctgcagatgctgttccgtggacagaatattctgggatacaaccactacgcagatgatgtagttgagtatttcgtgcagaagtctattgcaaatggtattgatatcattcgtattttcgactgcttaaacgatatccgtaacctggagactgctgtaaaggcaacaaagaaggaaaaaggacatgctcagatcgcactgtgctacaccttaggtgatgcttatactctggattactggagagacattgctaagagaattgaagacatgggagctgattccctgtgtatcaaggatatggcaggtctgttgactccatacaaggctactgagttagttaaggccctgaaggaaggaaccacacttccgatcgacctgcacacccactatacttccggtgttgcttccatgacctatatgaaggctgtagaagcaggttgtgatatcattgactgtgcaatgtctccactggcacttggtaccagccagccagcaactgaagttatggtagagaccttccgcggtactccatacgatacaggatacgatcagaagcttttaggcgagatcgctgctcacttccagccgatccgcgaggaagcattaaagaccggactgttaaatccaaaggtattaggcgtaaatatcaagactctgcagtatcaggtacctggcggtatgctttccaacctggttagccagttaaaggaagctggacaggaggacaagtaccagcaggttctggaggagatcccgagagtacgtaaagactttggtgagccgcctctggttacaccttcttcccagatcgttggtacccaggcagttcttaacgtattaatgggtgagcgctacaagatggttccaaaggaatccaagaagatcatgcttggtgaatttggccagactgttaagccatttaatccagaagtacagaaaaagatcatcggtgatgagactccaattacctgcagaccagcagatttaattgcacctcagatgcctcagtttgagaaggaatgtgctcagtggaagcagcaggatgaggacgtattaagttacgctctgttcccaaatgttgccaaggagttctttcagtacagagaagcccagcagaagaaagtagatgctgctgtagcagataaagagaataaggcttatccagtgtaattttggattatccggaataagataagtatgaaacgcgtccctttatggggcgcgttttttcattataggctttagccggttgaggacattggagtttttcgtgttccgaaaaatggaaatgtccgaaacaaaaaaccacccgctatgcgggtggagccaacaatgttatacaaaaaatcacctttccgttagaatagagttgttcaggctactatgctaaatgaaaggaaaggtgatcttttggcaaataaaacaaatgatatggcacatacaaaatggctatgtaaataccatatagtatttactcccaaatatcgaagaaaggtaatatacaatcaatacagaaaagatttacgggacataataaaaactttatgtggatacaagggggtagaaataatagaaggaaaattaatgccagatcatgttcatatactggtaagtattccacctaaatacagtatatcacagtttatggggtatttaaaaggaaaaagtgcattaatgatgtttgatagacatgcaaatctgaaatataaatacggaaatagacatttctgggcagaaggatattacgtgagtacagtaggcttaaatgaggcggcaataaaaaagtatatacaagaacaagagaaacatgatatagcgctggataaattaagcgtgaaagaatatgaagacccctttagggggtagccagtagtacaaacacccttttaagggtagcaacgagtcaagggcataatagcttgaacgaaaagtgaaagccagcgtctttaggcgctggccggtaacaaaggcttatagccgctgagtaaaccacccgttagacgggtggtattgattagttttttgcctcagcctctggcgtaaatctattgaagatgatacactgatatactggtacatcgtttttgaaataactatactacttacttgtctgcgaatctgataggtatagttatttacgaaacgatataccaggagaggttttgtgcaatgaggaggagaacatgctgaaggtattgatcgcagatgatgaagaaaagatctgtcagctgatcataaagctgatcaactgggaagaaatggggttaaaaatagcggcaactgcttctaatggtattgaggcattagagcaggcaaaaatctgtaaaccggagattctgatcacagacatacggatgcctggaattgatgggatggaactgatcaggaaagtaaaagaaaaactgccggatacagagatcatcataatcagtggatacaggcattttgaatacgcccagacggcgatccgttatggtgtgagaaattatctcttaaagcctattaaaaaagaggaattacgggataccttacaaaagatcgcagatatttacagggagaaaaatgaacagttaaattttgaagaaagagtccgccttgccttaaaaaatgatgcaggaaagctgcgtaccagttttatttcccgtatgatctacggagaccgggagcgggaaaatattatcagcctgaaagaactgaacaatcagtatcatttccatttccgtgagggagtgttccaggttgcagccatcaaatttgaccatgtaaaccacaatgacagctgtatttccttcctagcagacaaggcagcaggcttggcgttacagtatctggaaccggtatgttttgaccatgaggtttatgcagagttctctaccttttatcttctgttgaatttcggggaagaagagagcaaaaatgtgcggaaaaatgtgcgccagatgctggatgaactgaaagcccaggaaagtatcttaaatggaatgagtgttaccataggaatgggaagcatggtaaacacagcgggcagtatcaggaagtcttttctggacgctgtatttatgataaagcagaggcttcttttaggaaccgggcggatgctggaaatggatgaagcacaacagagaaaaaactctgattttataaacagtgaggcattttaccgttttaacagggaaatggaacgggcagtcgaagctttaaatgtagtggagacaaggcggactattgaaggtttgcgggatgtattaaagaactatccggggatcaccggttatgagatcctgcagatgactaaggaggcctgcaatcattatttgttttgcatgaagagcagggggatccgtgtggacagtgaagctaaatttgtggaagaattcagtaaagacgcaggggaatgtgcagatatagaagaactgttccgccttttaggtgggacgataggaagatctctgcaaaaagcttctgaagcgaagaaggcagaagataaccggcccatacggcaggcaaagcagtacatagaagaaaattacagccgttcgcttaccttagaagaagtaagtgagatggctggctttgctcctggatatttcagcacgctttttaagaaagaaacaggggtaacttttctggaatttttgcagtcagtgcgtatggatgcagcgaaaaaactgctggtttccggaaatgagggaatgaatgtgatctgcgaaaaggtaggctatgcagatgtgaaatatttcacgaaatgttttataaaatataccggactgaagccgggagagtacaggaagatctattcatgaataaagaaagttatctttttgaccgtatacgttggggcgcagcgatttttttgatttttcatatcagtctgttgtttatcctgttccttcaggattggaagacggagaaaatgaagtggtttattttgtttttaggagtgctttatgttatcctgctttatgccgcttatcagctgatctaccggcctttaaaagtgaacagccggataaaggcggcttttgccagaggggacagttatgaggatatttaccatatgccttatcttttaaatgaggaagagcagaatatgctgcgtcgtttttatgccctgttagacaaaagcgagctgatcactgtatctaagaaaaaatcggaatatctggcattacagaatcagatcaatccccattttctttataatactctggaaggcatccgggcagaggcgctgatcgcaggggtggattctattgcggagatgacggaggcactggcaacttacttccgctataccatttcccaggtaaataacctggtcacattggaagaagaactggcaaatgtggaaaattattattatatccagcagtttcgttttggcagcaagctggatctgaggatccgctatgactgtgaggatgaagaggaagcgcttatgtgccagcttcccaagctgactttgcagccgatcgtggaaaattccatttatcatggactggagcgcaagattggaacaggtcatctggatattaaggtcactgtgacagacagccatctgatcattatgatctcagatgatggtgtaggcattgaaaaaggtcaggtgaaggttatgaatgaacagctgagagccctgagactggaggaggaaaacaacggggaaaccggtaaaaaaggcggaattgcagttaaaaatgtaaataaccgtattaagcttttgtttggggaagaatatggcatttatatctacagccagccggatgtgggaacggatgtggagatcacacttccggttgtaaggaattgatgtaacgaacatgctgataaacaggaggcagctatgaaacaggaaatacttcgttttgaaaatgtgacctgcaaaaaagacggggctgtttatttggataatttcagtttttatatgactgcaggtgagatcgtagggttgctttctgtcaatgaccgggggatcaaagaactgatcgaactgatggcaaagaaccatcctattgatgcaggaagagtgtatatgggtggcaaactggtaaacagttatttaaatcaggaggaaacatctaaccgtatttaccagatcgaccagaaaagctctctgatcaatgatctgtctataacggataacctgtttgttatgcgcccaggatttaagaaacaggtgatcaatgaatgggttttaagagaacaggcagacagagtcttaaaacagctttccatggatctggatctgaataaaagggtggaaaggcttactaccatggagcggatcatggtggagatcgccaaggcctatttaatgggaagcaagcttttagtggtgctgtatccggaaaaactgatcggtcaggcagatttcccgcagtttcaccagcttttaagaaaaatgcagagcatggggatctctacgctgtatttctgctatcatcactggatcatgtttaagatctgcgacaggatcgccctgttttccagaggaaggataaaaaaattatttgaaccagaggaattcagggaagaggctatagctccctatatttattattttaaagaaaatacagtatttaagccgaaagtggatcggggatatatgctggagctaaaaaacattacagatggggacatacataacctgagtctgggaattaagcctggggaatgcattacgcttttggattcaggtgaccagatcatggaccggctgaccgggatccttgcaggggaatacgtggactatgagggagatattttctgctcacacaaaaaaatggaaaaaaaagtaaaaagcagcctggaccggggaatgatcgttttagatgataatccagcgcagtctttccttttttcggaaatgtcctatctggaaaaccttacctttttactggaccgtaaattaaagaaaagcattttaaagcagtcatatattaacagtgtgcgcagtgaatattatggggaagcaggagatgttattgacacaaaatatattgattccctttctttaaaggaaaaatatgggctgatctataataaaataagcctgttccatcctaagatcctggtggtaaaaaagccttttgcttatggggatatgcattgccgtacctatattttaaaacggatgcaggaactgaaggcagcaggagtatctattctgcttttgaccggctatcttacagattgcgtatatatatcagaccatatcgggatcgtaaaagacggaagtttttctgtactgttagagccacaggagtacgggatcaccagcagacttttttgatagatgtctgcattattctgaaaaatgtctaccctattctaaaaagtgtccccttattaattcctcctgttctgttataattttcttaataaaagaacaggaggggtaaatgataatggaacagttaatgagagaaaaactccttacagtaaaaaaagagatggaaggctttatgaaggaaagcgttccattttggcttgaaaatggaatcgataaagaatacggcggttatctggtatgctttgattccaaaggaaagctgatgaaggaattggcagtattaactcctgaggataaaatgatcgtaacccagacacgtatgatctggggattttcggcacttcttcgcaatggcctggcaaaacgttatggctgggaagaaaaatgcaaagaagcagcaaaacagggtgtagatttcttcattgataaattctgggataagaagaacaccggctgggcatgggtaacagaccggaagggaaatgtcctggataatgggaaactggtttacggacagacctttgcaatctatgcgttagctgaatattatatggctaccggtgatgagcgaggtatcgaatatgcggaaaaaacctttgatgctctgaaaaaatatgcagcagacactttctacggcggctattttgagaacttcaaagaggactggacactggaaagtgccggagtttatggaggagacctgaaatccctggatatccacatgcacaccatggaagcatatacaactctttatgaggcaacccacaaggaagtacataagagagctcttcaggaaatcattgatattgtgttaaaacacatggttgattatgatttctggtgtggaagaaatcagtttagtattgattttacaccaaagccggctatttccattcgcagaacctggaattatgacagagatccggaaagtgctaacaaaaatccattagatactacttcttatggacacaatattgaactgatctggctgttgaaccgtgcatatgaagtgctgggacttccgcctgccagagaatttaccagaaaatttgcagattacacactggcaaatggctgggacaatatccacggcggtatttacagagatggaatgcacgatggccgtattgttgtaacagataaagaatggtggcagaactttgagtcactgacaggtttccttgattcctatcaggctactgaggatgagagatatctggataccttcataaagttatgggaatttgataagaaatatttctataatccggaggttggagagtccagacagttgcttttagcagatggaacaccggtgatcgatgataccggaaatcagtggaaatgtatttatcatacagaccgtgctatgatggagtgctgtctgaggatcgaatcactgacggaataatgtcagcacagtcgcaaagcatctttgaaaggaagcaaatatgggagaaaagaaggcagaggtgcctgtggggaaagaactggtccgaatgacaggcattatgaaagagtttcccggtgtaaaggccttggataatgtaaaactggacctgtatgccggagaggtgctggcactgttgggggaaaacggtgcaggtaagtcaacactgatgaagatcctttcaggtgtttatcagagagatgatggagagatcatcctgtttgggaacaagatcggtgagtgggatgcaaataaggcaaaaaatgcaggtgtgtccattatccatcaggaattaaatatgtgtactcatttaagtgtggcggagaatattttcctgggacgggaactgataaaaaatggccgtctggacaatgaacgtatgaaccaggaaacaaaagagatccttcataagttaaatattgatattgatccaagggaacaggtcagtgaactggctgtatccaaacagcagatggtggagatcgcaaaggcactttcacagaatgccaaagtattgatcatggatgaacctacttcagcacttacatccaaggagatcgatgagctgtttaagatcatccaccagttaaagtcggagggtatcggtattatctacatatcccaccgtctggaggaactgcagcacattgtagaccgtgttatcatcatgcgcgatggaaaatacattacccagatgccgtatgatattaacaggatggatgagatcattgccaacatggtaggacatgagatcaaggagaaattcccaagagtgtcctgtgaaaaaggcaaaaagatcctggaagtaaagcatctgaatgcaggaagaatggtccgggacattaatctggaattatatgaaggtgagatcgtaggaattgcaggactgatgggtgcaggacgtacagaaacaacccgtgcgatcttcggtattgatccgaaagaaagcggagagatctttattgatggaaaagaggtaaagatcagctgtccggcagattccattaaagcaggtctggtactggcacctgaggacagaaaaaaagacggtctctgtacaagacttagtattgcagataatattgcccttccgaatctggatatactttgtgaaggtccagtggggactgtaaaccggaaaaaagaaaaagcaatggttgataatgctgtaaaagccctgaagatcaagcttcctaacgcacaggtagatgcaggaagcctttcaggaggaaatcagcagaaagtggtagttgccaagtggctggccagaaattcaagagttgttatctttgatgagcctaccagaggtattgatgtagctgccaaggtagagatctataacctgatgaatcagctgaagcaaaatggcattggtgttatgtttgtttcttctgaaatgccagaggtaatgggaatgagtgaccgcattattgttatgtgtgatggccgtattaccggagaactttcagcagaagaggccacccaggatatgatcttaactaaggcaacgcagtttgaacagaaaacagcgttataacgaattttggatttaatctcatcaaggagggacaatatgagtagttcaagtgataaaaagcccggtgtactggggcgtttcctttcccagaggggaatgggacaggttataaccgtaacaataggtctgatcgttttatgtctggtgtttggatttatcaatcctaatttctttacttacagaaatacagcgaacctgctgcgccagatcgcacctacacttctgatcggtgtaggacagtcctatgtattatttacaggaaatatcgatctttctattggttctgtagtaggtatgagctgtatgatctcagcaaccctaatgtgtcatggaatgaatccgtgggttgcagtggttatcacattggttgtgtgcctgttagttggttatgtaaatggcattctggtatcaaaatgcaagctgccacctttcatcgcaaccttaggtacaatgacaattgcaagaggtattgcacagatcgtcaatggtaattacaatacagactccattggtgaagctgcaaaaggtttccgtaccttcttctacagtggtaagatattaggtatcttcagtgctttctggatcgctctggtgatctggttcatctttaactacataatgagctgtaccagaaccggccgtcatatttacgcaacaggaagtaatattgatgcagcaagactttccggtgttaatgtagacaatacagttatctatgtttacgttgtagctgctttttgtgcctgcataacaggtctgatcacctgtgcttcaactggtacaggtactatggatgctggtacatcttatgaaatgtatgcagtagcagcttctgtaatcggcggcgtatctacattaggtggttccggtattttacttggtactgtgatcggttccggtatctggggtgttttacagaatggtcttcagtttgcaggagcaccggttgctatcagaaatatcgtgatcggtattatcgtagttgttgcagtacttatggacgtaatcgtaagaagcggcagaggcaagagcaaaaaacataaaaacaactaaaaaataggtaaaatgaaggtaaagacgaaggtaaagcataaaaatgctttcacaataaagaaaggaaaggtatagtattatgaggaaaaaagcgatttcaatgattctggcggcagcacttggttctgcattattagcaggctgctcatctgctccaaaggagacaactgcagcagctacaacagctgaaacaactgcagaggagaagaaggaagaaagcaaagctgaggaaaccaaagcagaagagaagaaagaagaggctgctggcaatgatatgctgtccggggaaacaggagacattgcaaaggccggagatggaaaaggacagaaggtagttcttatcaccattgactctatggatcagcactgggtaaacatggacaagggctgcaagcaggcagcagaagagcttggctgtgattataagtggatcgctcctgatgtaaaagatgacgcaaagcagatcgagtgtgtaaacaatgcagtagctgatggcgcaaccgctatcctggtagctgcaaatggtcctgacgctatcacagcagctctggaagaagcagatcaggctggtgttaagatcgttcaggttgactcttttgcaaattatccttgtgtacagaagttaggaactgacaaccgtgcagcaggaaagactgctggtgagcaggttctggcagctctggaagctaagggagttaaagaaggcaagatcggtatcgtttctgtaaacgcagcaactacttctactgtagaccgtgacgaaggcttccgttccgcatttgaaggaaccgcttttgagatccttgaaacacagtatgcagatggcgatgcagcaaaatctaaagatgcagcagctaactttatttcccagggttgtgtagcactgtttggtgcaaatgaaggctcctgcgttggtgttggtaatgcagttgcagaagatggaaataacattgtagcagcaggtatggataagtctgatgcagttatccagctgatcaaagatggtgctctgatctgtacaatggctcagaatcctgatgttatgggttatgaaggcatgtatgcagcgatcaccgctattaatgatggaaaagtagctcctgaatatattgatactggcgtttctatcttaaatttagatgcagttaaataatcaggctgtttaaagaaacaaagtgaggaaaaatatgctccggcaggtatatcagcctgccggagctgttttcattgctgcacataatgtactctcgcaaaggcaagtgcaggaaagactccgagagtacatcatagaagaagggagagactgtatgtatctgtatggatttgatattggaggcacaaaatgtgcagtgatcctggcgaagatggaaggagaccaggtagattttctggagcggtatgagatgaaaacactgggagattggaaaaaggtccttgatgaattatctgaaaatgctttgatgatagcaaagaaatatgggctgacaacagggactgagggtgaaaattgtgttatctgtggggggatttcctgtggcggtcctttaagtcccgacaggaagtggatattatcgccgccgaatcttcagggctgggatcaggtgcctgtagtggaatatcttgaggagaagctgggaatccctgtgaaaatggaaaatgatgcagatgcaggagctttggcagaatggaagttcggggccggaaaaggctgtcagaatatgatatttcttacttttggcacaggtcttggttccggtcttatccttaatggacagttataccggggaagtaccggtatggctggggaagcaggacacatacgtatggaaaatgagggaccaaaaggatatggaaaagcaggtagcctggaaggtttctgctctggaggaggtatcagcaggcttgccggatattttggcacagaaggaagcgcaaaggagctggcagaacgggctgaggccggggatgagagagctttagcagtgtatgccagatgcggcgctgtttttggaagaggtctggctatccttatagaccttttaaatccggaaaagatcgtggcaggttctgtttatgccaggagtcaccatcttttagataagaccatgtatgaagaactggaaaaagaagcgctccccatgaaccgggcggcctgtgagatcgtgccggcggctttaggagagcggatcggggattatgcggctgtagttgcagctgttaattctttgtccattttatagcggcagatacatccagcatgccgcctgttgctgttttgccttttaacggggccagtttatgtacagttgataaaatagctgtttttatgtcctgaaggcttaagtcagttcttgcagagtagatcagggcagctgcgcctgttaccataggggctgccatggaggttccgctcatataggcgtaagaatcaccgggaatagtgcttaaaatataggttccgggggctgccaggtctacggaagtggcaccatagttggaactttcatctaaatggccgttaaaaagcagattgcctacggtaattacattgtcgtagggaagacttgccgggtatacaggggatttatcaatgtcataaccgatctggtactggtttccatttcctgcagctactacaaaaagcattttggagtcccggatggctgcttcaaattcgggagtgcagttactggaaccgaagcttaagttgcagatatcggcaccattggcttctgcatattttatggcttcgatgacgctttcaggggaacctttgccttcagaaccgcctaaggcttttaataccataagcttaacatgggtgctgtctgtaatgcctgcgatgccgccattgttccaggcggcggcaatagtgccggcaccatgggttccgtggctgtcttcttcccctgtgcagatttcattgctgtttgaaacaaaattccagccattcacatcatctacatagccatttccgtcattgtcaatgccgtctccggggatctcatcttcattgacccagatggaatcttttaagtctgaatgagtcgtatcgataccggtatcgatgatagctacggtaacggtacgtttgttttctgtttcgctgtatgttttccaggcatcttcaatgttgatatcaatatttgccactgcatcggtgttaatggactcgaaattgtccggtcctaaaggaggaagggcaatatcatctatgccattttcgccataatggagataaatatggtccaaggttttgatgttcagcactttttccgtgcggcgaagccgtccggtgttgttaagagcccactgatattcgctgtattcatcgccggaagagaaggcagctacgccaggaccgctgaagaaaagggaaaaatcccggctgttttcctgggctgccagtgcggacatggaacagggggtcagcgtcattgtaagggaaagcagggtggaaatgatgcctgcaggtagtcgtttcatgaaggggcactcctttcgtggatagtcgaaggacactcacgaacccgcgctgacgcgctctgctgtttgatggtgcagacggttcgtaaggatagtcactcacgaacccgcgctgacgcgctctactgcctgctgacgcaggcggttcgttcgttggtggcaccgaaaaacaaatgtctgctgcgcagccgcttgtttttctttcgtgcctaccacattataccatgccagctgtgatgaaagtatgacatttttctgaagaaatatggtatacttgttatattcttgttaaaaatctttcaaggggcttgagagtttgaaatgtaaacagttgtgaaaattatgtctaacaggtgaaagcagggaaacatgttttcttagagaggtcattcaattgagggggaaataagatgtatcagaagtacagtattggaaccatggcaaaactgatgggtatctcggcggaggcaatccggtattatgagagcaggaacattatcagtccggtccgtgatccggaaacaggctacagatactacaatacctgggattttcatatgcttttaagggccagacactaccagaactatggtttttcactggaagagatagcagaactgttcagaagccatgaattaggggaaatacgggggaaaatggtggatcaggaagagatgatccagcaggagatcatccgccagatgaaccttttaaagcggatcagacagagccaacaggtgcttcaggatgcaaaagacagcgttggaaagttccgtattgaggaaagaccgggcatttaccgcatgaatacccagaaaaactatactttatttaagaagaaagagcagctggatctgatctcagaatggacagaaaaagaaccttttgtcttttcatgcgcagtattttatcagaaaaatattgaaaatggagagtcagagtttgatttcggaatgggacttcgggaagagtatgcacaattcttgcatgtaaaagagtcagaactggtgcagtattatccgccttgtccctgcgttcatacctgtgttccctcacgttccggaaaatatctgtcactggagagtttacaggaaggtttccggtatttgaagcagaatggattaagccttgcaggggatattgtcacccaggtagcctgcatgaccaagccggaagaggagtattttaactggcatattgtgtggtttcctattgaaaaatgattgtgcagagtgcaataagccactctgcattttttgtgcaaaaaatcaacttgaccttaaaaccactttagttgttatagtagtggcagatgagcaagttaaaaaaataacaaatacatttaaaccacttaaaaaagtgaaaggggaaaaaggtcatgagtgaacagaagaaaacagtattgatcaccggaggagctatgggacagggacgtgcccatgcagttaagtatgcacagaacggatttaacgtagttctggcagatatgctggatccggaagatgaaagattccaggaaaccattaaggaattaaatgaattaggcgctgaagttttagctgttaaggcaaacatctgcagcacacctgatatggaaaacttatttgcaaaggcatgggagaagttcggacgcttagatgtagttatcgcaaacgcaggcgttatcaacttcggaaatacctgggagctgacagatgagcaggtagagaaggttatcaacatcgacctgatcggtacctggagaactgacaagtacgcaacacagtacatgttaaagcagggctttggaagaattatcaatatcgcttctaccagtggtctttacggaacaccaaagttagctacctactgcatggctaaatggggcgttttaggtctgaccaagactctggcaaaagaagttggaagcaagggtatcattgttaatgctctttgcccaaccaaggttaagactccaatgtgcgaaacccagagctatgtagagttcatcaatgaactgaccggaaagaactttaaggattacaaggaaatgtatgcaggagttcctttcctggatgttgaggatatttctgatatggtttactggcttggaaccagccgtgcagctggcaagttcaacggcagagacgttgccctggatctgggaactcttcagtgctaatcactgaataaaaatggacatgctgccagacagtggcatgtccatgaataaaagcaaacagaagttggggacaaaagaaaaatgggtaattttggttttaaaaatgtatcaaagagaaacaagattgatctgatggagtacctttgctatggactgggagatttctccttttgcttcatttacggagccatcggttcttacattgttttcttttatacagatgtggcctgcatcagtgcagctacagtaggaacggtacttttagtcagcaagatcttcgatggtatttctgatatgatgatgggatatatcattgaaaatgtccattcaccgctgggaaaagcaaggccgtggctattatggatggtaattccgtactgcatcggctgtgtgctgttgtttacagtaccgaatttcagtgaaacaggaaaggttatatatgcatttatttcctataacctgatggcaacctgtattttcacttccatgaacgtgccatacggtgttttaagcagcgttatgacaaataagcagaacgaaagagcacttctttctatcagccgtgcaagtttaggagctttaggcgtattcgtgatcagctcctatgcacctgatctggtagaaaaatttggcggcggacctgccggctggcagaagacattcctgttagtaggtgtcgtttctatcgtactgtttttaattacattttatggatgtaaagagcgtgttggttccggtgttatggaacagaaaacaggaaagaaatcttccttatctttattacagggagtgaagatcctgtttgcaaacaaatactggttcatcatgctgatggtcaacattttctatactgcaatgaccagtctttacggcatgaacatgtattttgcaaaatatgttatgcaggacgcaggctacaataagaccatgatgatgtgttccacattcgcatccatcctggttcctctgcttctgatcccggttgtacagaaaatcggaaaacgtaatgtggcgctctatggaggcgcaggaatgggtattgcaggacagatcgtcctcatcctgtttgcagagcagtccatgggacttatgtatctgggactgatccttcgtggaatgggtgttgcatgtatttccgctaccaagtttggtatgatcgcagacagtattgagtacggagagtacaaaacaggtacccgtgcagaaggtttcgtatattccgctgcatccttaggtgtccgtgttggttccgctcttgcatctgcagtcatcggctgggtactgggagcttatggatatgacggcaagctggcagtgcagagtgaaactgcaatgaaaggcatccgtatcatgttctattatgcgccgttagctgtatttattgctattctggcactgctgctgttttataaactggaccgtgagtatgacggcatcatgaaagtcttagatgagcgccacaaacttgcggaacaggcaaatgcataaagttttacaagtcacatttttaaggagagtttagagtatgaatatcacaaaagcaactcgctggagagtatttgccggtgtatggctgcagagcttatttacctctgctactgcttacttcagtctgttttgtatcccgttaacaaccaagtttggatggagtgattccgcattcgcactggcatatactatttatatgtttacatactgtgcagttggcttcatcggcggttccttagctgagaagatcagtccaagaaaaaccatttacattggtctttgccttttcgcaggcggctggttcttaaccggttttgcatccagcatcccacagctgtatgtattttacggattaatggctggtgccggcggcggtatgatctacccggcatgccttcctactgcattaaagtggttccctgaccgttccggttctatttccggtctggttcaggccggcgcttcctgcggtcctttcattatgagtcctattgcccagactctcattgaccgtgtaggcgcacagatgacctgccgcatcctggcgatcgtattcctgatcggtgttggtattgcagcagcaatgatcgttccttgtccggaaggatggactccagaaggctggaagccatcagctgagcaggctaaggtattaaaaacaaaagattacagcatgggcgaaatggttaagacccctgtattctgggtactgttattaatgttcatcttcgcaaatgcagcaggaaccatgatggtttccttcacaagcccgatcgcacagcgtcaggttggtcagactgcaatgaccgcagcattctgcgtatccattatgacactggctaacatgtgcggacgtattggttttggtttcatctacgacattttaaagggctggaagagcctgatcctgttaatggtcatcaatggagcttccatgttaatgctgacacaggcaactacacttccatactttatcgtatgcatcgttttagtaggcttctccttcggcggactgttagtagtatttgcgccaatggtacgtatgatcttcggttccaagttctacaaccgtaactacggactgatcttcatcggctatggtatcggtgctttcgtaggacctaagatcagtgcttacttctacgacaccaccggccagtacaccatgggcttcatcggatctgcagtattagcagttgcagccatcgtactgatcgtgatcgcacagaagatggcagaaaagatggaaaatgcgcagtaagaaatgaagttacagttcagtaacaattaaatagtaaaatgtttataaaaaccctggaaactggtgcagttgtgtgcctggtttccagggtttttaaaataaaatgcttgaagcatatgcccttctgccttataataacagggaaagacccggaaggttacatgatttctgggctatttttttgaaatgaagaaatgaggataagacagaatggaaataaaagcacagatcaccaaaaaactgcagaaatacaaagcggatgagatcaaaactctgtatcagctgatgctcagagtattatccggcaatgatgattttcgcatggtacaaaatgcagatacagatgatctgcgtcctgtaatcgaaggggagacaggagaaaagatcgactttgcaatggagtccattatttcaggagagtcactgaaactgtggcaggacatccaggcagaggaagcagaaaaagtaaaattaaagaaggcagacagaattgaaagaattgcttctgttatgagcgatgctgctttatttgaaggtttctgcctggctttttatggaaaagatgagatgctggcagttctctgcgatgagtatggctgtctggaagcttatgaagccttagtacaggatactgtatacagaaaaagaagagcttatatgcgcatgctttctgactatgtgctggcagcctcccacctgtatggtgtagtatctcttcatgattttgaactgctgctgcgctattacgaaaagaacctggatgatttcgatggctatgcaagagaagaaggaagctataaaaacaccatccttttccagccaagatacttagggctttgtaccttacagcagctgatcggaaatacagtaccagaagtactgactaccatggacggcctgtttttacatccttcttttacagaagatttccagaaagaacagaaggaaatggtaaaggcatttgcgaaaaatggtggacagaatgtgggagaaaaggatttcgaccagttctttgcagctgcaggggaaaaaacttcctacagaaagctgctgcgtgacaccatggacaagccaatgtatcttccaaccaaagaagaatttttaaagtacgtaaacgaagattaccatgtgatctcgactgcagaaaagaatttaagaaactatctgaagggaaaatatggaaaagaattagaaacagcagcacaggcagcaggaactaccccggaggtatacttagaagcctttatcgcaaagctgcgtgatttaggcacagatgtaggaaaaggcggagcagagccggatcctcaggcacagatccagtttgttttaaccacattaagacagatcggcgctgcttttgagaatattgcagacgcaaaagaaccactgcgctatgcaatggaactgtccaatgcagagcatttatggtgcaaccgtggatttagcgcagacggactggcagtgcgtatggctgcagaaaagaaaaatacagacattgcagccggtcttttaaatcagggcaaggcaaatgggcaggtagtcagaaagactgcaaagatctatccaaatgatccatgcccatgcggaagcggcaaaaagtataagaagtgctgcggaaagaattaggcataaaatatgaatcaatacgagatcttgaagcattattttggatatgataccttcagggatggacaggagaaactgatccatgctatcttagaaggaagagatgtccttggcattatgccaacaggggcaggaaagtccctttgctatcagataccggcacttatgatgggcgggatcacacttgtgatttcgcctcttatatccttaatgaaagatcaggtaagtaacttaaaccaggcaggtatcctggcagcttacttaaacagttcccttacacctggtcagtaccgtaaggtactggaactggccagaatgggaagatatcctattatatatgtagcaccggagcggctgataacggaggattttcttcggtttgccttagacccacaggtaaatatttccatggtggctgtagatgaggcacactgtgtttcccagtggggacaggatttcagacccagttatttaaagatcgtagactttatcaaacgtctacccaaacgcccggtagtcagtgcttttacagctacagctactgcagaggtaagagacgatatcatagacattcttatgcttcaggaaccggaagttttaaccaccggctttgaccggactaacctgtattttggtgtacagactcccaaagatcgataccaggcattagtggagctgttagaacagcataagtcagaaagcggaattgtttactgtcttacccgtaagatcgtggaagaagtatgtgaaaagctgatcaaagagggattttccgttacccgttaccatgcaggcttaagtgatgcagagcgaaagcacaaccaggaagagtttatctatgataatgtgcggatcatggtggctaccaatgcctttggaatgggaattgacaagtccaatgtgcgttttgtcatccattataatatgccgaaaaatatggaatcctattaccaggaggcaggaagagcaggacgtgacggggaaccggcggagtgcatccttctttatgggggacaggacgtaatcaccaaccagttttttattgatcataaccaggataatgaggctttggatcctatgacaaggcagctggtcatggagcgggacagagaacgtctcagaaaaatgaccttttactgctttacccatgagtgcctgcgggattatatcctccgctattttggggaatacggcagtaattactgcggaaattgttctaattgtctcacacagtttgaaaataccgatataacggaaatggcaaaagcactgctttcctgtattgaaaccagcagacagagatatggcgcgactgtgatcattgatacagtccatggggccaatacagccaagatccggggctatgggatgaatgaaaatccggagtatggctctttggcgaaagttccggtgtatcgtttgcgtcaggtcttaaaccagctgcagttggagggctatcttactgctaccaatgatgagtatgctattttgcgtctgacaccaaaagctgcatctgtattaaataatgaagaaacagtatggatgaaactggcaaaagagcagacaaagagtgagcaggaaacgcagaagaagagcaggaagaaaaagagtgctctggctggatccggcgaatttacagaggcagaggaaaacttatttgaaacactgcgaaaacttcgggcccagatcgcaaaagaagaaaaagttcccccgtatattgtattttctgataagacactggctcacatgtgcattataaagcctgtaaataaggaagaaatgctgtctgtatccggtgtgggagagtttaaatatgagaaatatggggaacgtttcctggcagcggtaagagagcagacagaataatattgtgattttaagatgtttctgaagaagcaggtttaaaaagctttcgagagaacattaagatcaaaaggagaaaaataagatggaagaaaacaggataaacagtgtcggtgaaaccgcagacacaataggcgggggagaaaatctggaaacaccacataagcgccgcgtccgttacaaaggtactcatccaaggtcctataaagagaaatacaaagaactgcagccggaaaaatacggggataccattgcgaaggtcatcagcaagggaagtacaccggcaggtatgcatatttccattatggtaaaggaaatcctggatttcttaaacattcagccgggacagacaggactggatgctactttgggatatggtggtcataccagtcatatgttagcctgtttaaaaggcgaaggccatatgtatgccctggatgtggacaccattgaaatggaaaagaccagaaaacgtctggctgataaaggctttggaccggatattttaaccattaagcatttaaactttgccaatattgaccaggtggcagaggaagcaggcggttttgactttgttctggctgacctgggagtttcttccatgcagatcgacaatccggacagaggtttttcctttaaaaatgaaggtccgctggatctgagactggacccgtttaagggggaaacagcagcggaacgtttaaaaaagcttaactttgaagaattaaagggaatgctgatcgaaaactcagacgagccatatgcagaacagattgcaagaaaagtgatgaacgagaaaaagcatggtcgccctattgaaacaaccacccggttaaaagaagtgatcgaagaagcactttctttcctgccggaagcagagaaaaaagaggcagtaaagaagtcctgccagcgtaccttccaggcactgcgtattgatatcaacagtgaatttgaagtattgtacgcatttttagataaacttccaggtgcattaaaaccaggtggaagagctgcgatccttactttccattccggtgaggaccgtctggtaaagaaagcctttaaagaaggcttgaaagccgggatctacagtgagatcaatcaggatgtgatccgtccgtcagcagaagaatgtgcgaaaaacggaagggctaagtccacaaagcttcgctgggctgtaaaagcacaggagtaaaggtaaaattaaaaatggatcatatgtaaaaaccggcagctttttatcattcccagaagatatcctgatgtgatggagtgtaatgcaacaaggaactcatttgaatggatattggatctaaaacagggaatgaaataagttaccggttcatccgttcatatagataatgcagaagaaggcagttttattgcaaaaataagctgccttttattgccagtgcatttaaactgtgctaagatatgagttgttttggttattgtagtgggtaggcacttttggacccgaaagtgccgtacgataacgtagtggctgcgagaatttgccgtatttaaatgcgaagccacggcaaattccgttgctggaagagcaacttgttttggttgctggaacagcaacgtgttttatacgaaagagaggaaatgatcatgacagcatatctgatcgtctgcccgttggtatttctggcaggtcttgtagattccattgccggaggcgggggacttatttctctccccggatatctgatcgcaggggttccggcccatctggctcttggaaccaataaaatgagttctaccataggaacttctatttctgcggtgagacttttaaaacatggttatttaaaagggaaaatgaaaatggccatagcatcggcagtctgtgctatgacaggttctgttctgggagcaaaggtgtcgctgctggtttcagattctgtgatccggcatatgatgatcgtggtccttccgatcgtagcttatcatgtattaaaaaacaaaaacatgggagaagatgaaaaaacaggaaccgttccttacaaaaagatgtttctgatctctgtgactgcagctttcttcatcggctgttatgatggtttttacggaccgggtacaggaacatttctgctccttgtatttacaggtgcagccaaaatggatacccgcagcgcgtctgcacagactaaggtcatcaatctttcgtccaatatagcagcactggtaacatttattatagcaggaaatgtttattatcctctggggctggcagcagcagcctgttctgtagcaggcaattacctgggttcagggctggtagttcatgacggccagaagatcgtccgtccggttgttctggtggtactggggatcttatttataaaaattctgacggggaattaaaaggagaaatgcattatgaagtggaaaaaattcactctgactactaccacagaagcagttgatctggtaagcagcatgctggatgatgtgggtattgagggcattgaagtagaagacaatgtgcctcttacagaaaaagagacaaaaggaatgtttattgatatccttccagagcttccgccggatgaaggcgttgcaaaggtaagcttttatctggatgatgatgatcaggtagaggaaatgctgcgtcgtgtcaatgaaggactggatgagcttgctgcttatacagaactgggacagcgcactattgaggcatctgagacagaggataaggactggatcaacaactggaagcagtattttaagccgtttacagtagatcatatcctgatcaagccaacctgggagaccattccggaagagcacaaggacaagctgttagtgcagatcgacccgggaactgcttttggtaccggtatgcatgagactacccagctttgcatccgccagctggaaaaatatgtacacagtgaaagtgagattttggacgtaggaacaggaagcggtattttaggtatcacagctttaaagctgggtgcaaaagaagtctggggaacggatctggatgaaaatgccattacagcagttggtgagaacctggcttccaatgatatcagcagtgaccgtttccatgtacttcagggaaatatcattgatgacaagtctgttcaggactgggccggatatgagaaatatgatattgtagttgccaatattttagcagatgttattatcatgctggtaaaagagatcccggtacatctgaaaaaaggtggatatttcattacttccggtattatcaacctgaaggaagaagcagtccgggctgcatttgctgccagtgaagaactggaagttgtagagatcacttatcagggagaatggctctctgttactgcaagaaagaaataggagttcgggatgcatcatttttttgtagatccttccagtattgaggaagggattgtaaggatcgttggaacggacttaaaccatatgaaaaatgtgctccgcatgaaaccgggagaagaagtgctgatcagcgatggcacaggaaaagattataactgccaggtaaaagagtatggagcagaagaaggaattttagtgatcctttcggaaaatgcagacagcagggaacttccttccagaatctggctctttcaaggattgccaaaatcagataaaatggaagtgatcctgcagaaagcagtagaactgggagctgcaggtgtgataccggttgcaaccagaaatgcagtagtgaagctggatgcaaagaaggcagaggcgaagatccgccgctggcaggcaatcgcagaaagtgcagccaaacagtccaaacgcagttatatccctcaggtgggacctgtgatgagcttaaaagaagcattttcctatatagaagagcagaaatttgatctgcgcatgatcccttatgaactggaaaagggaatggacgggacgaagacagtattagaagctttggcgccgggacagcaggttgcagtgtttattggaccggaaggcggtttcgatgaggaagagatccaacttgcgctgaaaatgggagtaaaacctgtcagtcttggaaagcgtatcctgcgcacggaaacagcaggacctgccatactggctcttctgatgatgaagctggaaggagcattttaatggaagcatattttgacaattcagccacaacaaaggcactggactctgtccgggatattatggtaaaaaccctgacggaggatttcggaaatccctctgccaagcatacaaagggtatggaagcagaaaactacatccgtcaggctgcagccgatattgcaaagaccttaaaggtaaaagataaggagatcctgtttacttccggcggtacggagtccaataacatggctttgattggtacagcgctggcaaatcagagagcgggaaagcacattatcagtaccaggatcgagcatgcatccgtttatcagccactggcatttctggagtccttaggctttgaggtgacttatcttcatgtggaccacaacggacatatctcactggaagaactggagcagtctatccgcccggatactattttagtgtctgttatgtatgtaaataatgagatcggtgctattgagccaattgatgagatcgcccgtctggtacatggaaagaacccgaagatcgtatttcacgtagatgctatccaggcatatggaaaactggtgatccgcccgaaaaagcagggtattgatctgttaagcgtcagcggacataagatccatggtccaaaaggcattggtttcttatatatagatgaaaaggtaaagatccgtccgctgatctacggcggtggccagcagaaggatatgcgttccggtacagaaaatgttcccggtattgcaggtcttggtgtggcagccaaagaaatgtatacagaccacagtgccaagatggagtatcttactggtttgaaggattatctgatcgataaggcctctgaactggaaggtgttacagtcaacagcttaaagggtgcagaaggcgctcctcagatcgtaagtttaagttttgagggagtgagaagtgaagtgcttcttcatgcactggaagaaaaaggtatctatgtttcttccggttcagcatgttcttctaatcacccggccatcagcggtactttaaaggcaattggagtgaagaaggaattattggattccactttgagatttagttttggaatgtttaataaaaaagaagagatcgactatgcagtggatgttttgaaggagcttctgccggtgcttaggagatttactatcaaatagtcgaccgcctgcgtcagcaggcagtggagtacgtcaagtataaagaacaaaagaaaggaagtattatgcagtaccagtcatttttgatcaagtatgcagagattggcacaaagggcaaaaacagatacatgtttgaagatgccctgatccgtcagatccgttatgccttaagctctgtagacggtgagtttgatgttacaaaggaatccggccgtatttatgtaaaggctttaggagagtatgattatgatgataccattgaagcgttaaagcgtgtatttggtatcgcagatatctgcccaatggtgcagatcgacgataaggattatgagaacctgaaaaagcatgtagtagaatacatggatcaggtatatccggacaagaatatcacatttaaggtagatgccaggagaggagataagcagtatcctgtaagttctgagcagatcaaccgtgatatgggtgaggcaatcttagatgctttcccagagatgaaggtagatgtacatcatccggatgttctccttcgtgtggagatccgtcagaaggtaaacctgttctccctgatgatcccgggaccgggtggtatgcctatcggtaccaatggtcaggcaatgctgctgctttccggtggtattgacagcccggttgcaggttatatgatcgcaaagcgaggtgttaagatcgacgctgtttatttccatgcgccgccatacaccagtgagagagcaaagcagaaggtagttgacctggctaatctggtagcacgttattccggcccgatcaatcttcatgtagttaattttacagatatccagctttatatttatgagcagtgccctcatgaggagctgactatcattatgcgccggtatatgatgcgtattgcacaggcgatcgctgaaaagaccggttccattgcactgatcacaggcgagagtatcggacaggtggcttcccagacgttacagtcactggcttctaccaatgaagtgtgcaccatgcctgttttccgtccggtgattggatttgacaagcaggagatcgtggatgtttctgagaagatcggtacttatgagacttccatccagccatatgaggactgctgcacgattttcgtagcaaagcacccggttaccaagccaaatcttaaggtgatcagaaattctgagcgtcatctggaagagaagatcgatgagatggtgaagactgcgttagatacagtggaagttattgcttgccgcggcgaggtttaaggttgctggctgaagtatttgcgagggggttcttcattctataaaacattgttcgctggccttcgcttgcgtcagttcgcctgtgccggactgcgtccgttacggacgtacggctgcgctcgggatgcgtacaatcgctttattgaaagcggcccctgcaacgttatttctggctaaaagtccccgcccctgtagggcgggaagtgatgtataaaaaaagagagccgcattcccgcggctcccttctaactttaacattaaactcagtcgatgatgtatggagaaagtgtagaaagaatgctgtctacgtcattttctgcatggatgttcagatcgatcggcttggacagatccaggctgaagatacccataatagattttgcgtcgatgacatatctgccggaaaccagatcaaaatcaacatcgaacttagctaaatcatttacgaaagatttaaccttatcaatggaatttaatgaaattctaactgttttcataggaagcccctccttgtgtggtatgtaaatcatttttgcagaataaaactgcttacttttaatactaaaggtcagtggtataaaagtcaatagtgagattgtatgaaaaatcaggaagaaacgggaaaagttataattgtaaatatttggaaaaatcaggaggttatattatgccaaaagcagcccttcacaatctggggtgcaaagtaaatgcttatgaaacagaagccatggagcagcagttaaaggaaagaggttatgagatcgttccttttgatgagaaggcggatgtttatattatcaatacatgttctgttaccaatattgcggaccgcaaatcaagacagatgctccatcgtgcaaagaagctgaatccggaatctgtagtggtggcagcaggctgttatgtgcaggtggcatcggaagagttgaagaaagatgccagcgtggatattgtaattggaaacaataagaaggcagagcttgcagatattctggatgaatatttaggcaatgtccatgaggaagaggaggcagaggtatttgtaacggacctttcccatggcagtgattatgaggcccttcatttagagcagccttctgaccatacaagagcttttatcaaggtccaggatggctgtaatcagttctgcagctattgcatcatcccttatgccagaggcagggtgcgcagcagaagccgtgaagatgtagtgaaagagatcacaggactggtggcacagggatataaagaagcggttcttacaggaattcatttaagctcttatggaattgagcatatggaaggaaatcctgtaagccagggtgactggaaccacagggagttactggctctgatccgtgaagtccatgagattgaaggcctggagcgcatccgcctgggatcactggagccgcgtattattacagaagagtttgctaaaagtctggcagagcttcctaagttctgtcctcatttccacctgtctttacagagcggctgtgacagcgttttaaaacggatgaaccgtcattataccacagaagattatttaagacggtgtgagatcctgcgtaaatattttaagcgcccggctattactacggatgtgatcgtaggctttccgggagagacagaggaagagtttgatattacggaaaagtatctggaaaaagtgcatttttatgagatgcatgtgtttaaatattccagaagagccggtacaaaggcagcagccatgccggatcagatcccggaacagatcaagggagtccgttctgaccgcttattagctttggaacagaagatgtcagaggagttcagaaaaggatttattggtgagaaggtttctgttctttttgaggaaatgataacagtagatggaaaagagtatctggtgggacatacgccagagtatgtgaaagcagctcttcctaaggaagaatgtgagaagatgcatgctgcttccggtgttattttagaggcagaagcaaaagatcttctgacttccgatatacttctgttaaaaaatactattgccgaatagaaaaatatagagtagaatatataagaatacgtaaaggacgtgatgatatgggcaatataaaagaaacacagtattttcaggctgttcaggacaaaaaggtagaagtaagcgatgtactggagcaggtgtatattgccttgacagaaaaaggatataaccctgtaaatcagatcgtaggttatattatgtctggggatcctacctatattaccagccacaagggagccagaagccttattatgaaggtggaaagagatgagatcctggaagaactgatggcggtatatattgacgcccgtttaaaatagggcagccgggaaaatagggtcagggagtgggatgctctctggtttaacgtccattaaagtctctgtttagggactttttatgggcgttgatttttttctgtaatgatgatcacaaacgcagtttttgtgtttgttggtgtactgtattgttgagtaagctgtttggagaaatatcaataatgcggtacactagttttagtgtgcgcggaggaattgaatatgaggatcatggggcttgattatggctcaaaaacagtaggggtagcagtgtgcgatcccctgggaattactgcacaggcagtagagaccattaccagaaaggatgaaaacaagctgcgtcagacccttgccaggatcgaagcactggcgaaagagtatggggtagaaaagttcgttcttggttatcctaaaaatatgaataatacagtgggggaccgtgcacagaagtcagaagaactgaaagcggctttagagcgtagaacagggcttcctgtggagctgtgggacgaacgtcttacaactgtagcagcagagcgtgtccttatggaaagcggtgtccgccgtgaacacagaaaagagtcggtagaccagatcgcagcagcaatgatccttcagggatatttagatcatctgtccatgacgaaaaaagaagacggagagaacaatggataagccaatgaatgaaagagaagactgcattacgatgataacagattcaggagaatctgtagatttttacgtattggaagaaacaaggatccatggaaaagattatctgctggtaacggatgcgccagaggatgaggatggagaatgttatattttaaaggatgtatccggtgaaaatgacagtgaagctttatttgagttcgtggaagatgacagagaactggatggagttatgggcatttttgaagagttattaaaggatgcagacgtggaattagagaaataatgtaggaggaatcagcttgagtttagaagagaacgtgaatgaaaatgtaaaacctgagatcagtgcagaaaaaaaagaagaaaatggtaacggcgaaaatcgtgaagaaggggcaaaaccagccagaagaccacagtacagaagaccgagacgtgggcaaagagtgccaaaagctgtaaaagtggaagaaaaagaaggaacagaaaacgcaggagctgcagagccgaaaacagaagaaagacgtaaacctgctcaggcaagaggaagacagcagggaaacagaaggtcccttccggctgtaaaagaagcaggagagagaaaagcacctgtaagaaaaccttccagaaacaaccagaaagaagcaaagagtaaattaaagatcatacctttaggcggtttagagcagatcggtatgaacattaccgcatttgagtatgaagattccattattgttgtagactgcggtcttgcattcccgggagatgatatgttaggtattgacctggtgatcccggatgtatcttatttaaagcagaatattgataaggtaaagggttttgtgatcactcatggacatgaggaccatattggcgcactgccatatattttacagcaggtgaatgtgccgatctatggtacaaagctgaccattgccttaattgaacataaattaaaagagcataacctgttaaagactaccaagcgtaaggtaatgaagcatggacagtctgttaatctgggatgcttccgcgtagaatttattaagaccaatcacagtatccaggacgcttccgcccttgcaatcttctcaccggttggtattgttcttcatacaggtgactttaagatcgactacacacctgtttttggtgatcctattgatctgcagcgttttgcagagctgggtaaaaaaggtgttcttgctatgctagcagacagtaccaatgctaccagacctggatttaccatgtctgagcgcagcgtaggaaagacctttgatactatttttgcggaacataccaatcgccgtattatcgtagctacttttgcgtctaacgtagaccgtgtacagcaggtagtaaatactgcttataaatatggccgtaaggtagtagtagaaggccgcagtatggtgacgatcatagatattgccagtgagttaggttatatcaatatcccggaaggcactctgatcgatattgaccagttaaagaattatccgcctgagtctacggtactgatcacaacaggaagccagggtgagtccatggctgctctgtcccgtatggcagcaagcatccacaagaaggtatccatcgtacctggtgatgtggtagtattaagttctactccgatccctggaaatgagaaggcagtagcaaatgtgatcaatgagctttctgcaaagggtgcaaaggtgatctgccaggatacccatgtttccggacatgcatgtcaggaagacttaaagctgatctattccctggtacatccgaaatttgccatcccggtacatggtgagttccgccacagaatggcgcagaaggaactggctgagtacatgggtgttcagaaggggaatgcattactggtaaattccggtgatgtggtatctttggatgaagacagcggtcaggtaaccgatcatgtagcctgcggcgccatcctggttgacggacttggggttggcgatgtaggaaatatcgtattaagagacagacagaacctggctcagaatggtatcatcgttgtagtactgacactggagaaacattccaaccagctgctttccggtccggatatcgtatccagaggctttgtatatgtaagagagtctgaggatttattagaggaagctcacaatgtggttgcagatgcagtagcagactgcttagaccgccacgtaagcgactggggcaagatcaagaacattattaaagacagcttaagcgatttcttatggaagcgtatgaagagaaatcctatgatcttaccgatcattatggaagtgtaagaaggaggcgaagaagcatgagcagccgtacaagagagatcaacaaaataaccatggcgatcatccgtatttcggtaaagctgatgcttcttgcccttttgatccttcttttatatgaagcagtgatccgggggtatgcttttggccatgcggtgttttatgcagaggcagtggaagcagctccgggtcatgatattactgtagtggtaaaagacggggaagatgtgtcacaggcagctgatgagctggagaaaaagggtctgatcaaaaatatctatgcctttttattccagagtcgtttttatgattatgataagatatacccgggaacctatacgttcaatacttccatgacttccaaggagatccttcaaaaactgagcgaaaagccggaaaatgaagaggacgaaaaatccggggataaatcagggagcacaaaaacaacacaaaagagcgcagatcagagtactgaaaaatcagaaagtgatcagcaaaaacgtcagtcagaccttcagacagaagaagcaaatgcagcagatcctgcaaagagcaccctttcatcgggagaagcccaggcagatgcgcattcctattctggtgaagatgaggaagaaggcggctggatcgaagatgtgacagaggacggacaaaatgatcgtagataacaggattacagaatatcttcattccctggaaacaagcaggggagaacttctggatacaattgaaaaaaaggcgattgaagacggagttcctattatccgcagtgagacagccgccctgcttagaagcctgacagcagcattaagaccggaaaatattctggagatcggaacggctgtaggttattctgcgttacagatgtgtcaggtgatgccggaaaactgccatatcactaccattgaaaaatacgaaaaacgtattcctgaggcgaaagaaaattttagaaaagccggggaagaaagccgcattacctttttagagggagatgcggatatgtggctgaaagaattaaaaggaaaacagtttgatctggtatttatggatgcagcgaaaggacagtatttaaactggctgcctctgctgttagacctgatgcctgtaggagccgtgcttatttccgataatgtgctccaggatggggatgtagtccagtcccgttttgcagtgcagcgcaggaaccgtaccatccacagcaggatgcgtgagtatctgtatgaattaaagcatatggaagaatttgaaacagcggtgatccctataggagatggagtgaccatcagtaccaggatcagataggagaagatagataaatgagaaagacagagttattaataccggcaggcagtctggatgtattaaaaacagccgttatttacggtgcggatgccgtatatataggaggagaggcttttggattgagagccaaagcacataacttctccttagaggacatgaaagagggaattgcctttgcccatgcgcatgatgttaaggtctatgtaacagccaatattctggctcataatcaggacctgccaggggtggaggcttattttgaagaattaaaggaagtgggaccagatgcactgatcatttctgatccaggtgtatttgagatcgcaaagagagtacttccggatacagaacttcatgtaagcacacaggcaaataataccaactacggcacatatctgttctggaaccgtatgggtgcaaagcgtgtggtttccgcaagagagctttctttagctgagatcaaggagatccgctctcatatcccggatgatatggagattgaaagtttcatccatggtgctatgtgcatttcctattccggaagatgtctgctgagtaacttctttacaggtcgtgacgccaaccagggtgcctgtacccatccatgccgctggaaatattccattgtagaagagaccagaccgggagagtacatgcctgtatatgaaaatgaaagaggcacttatatctttaactccaaggacctttgcatgatcgagcatgttccggagctgatcgatgcgggaattgacagctttaagatcgaaggacgtatgaagacagctttgtatgtagcgactgtagcaagaacctaccgcaaagccattgatgattatctgaaagatccgaagctttatgaggcaaatatggaatggtacaaggaagagatcggaaaatgtacctaccgtgaatttactacaggtttctactttggaaagccgggaagtgatgcccagatctacaacagcaatacttatgtaaagaattatacctatcttggcacagtggaagaggcggacggaaaaggtcgttgccgcattgaacagaaaaataagttctctgtaggcgagaccattgagatcatgaagccggacggtcgaaatctggaagtagttgtaaagagcatctgcgatgaagatggaaatgagcaggaaagtgctccacatccaaaacagatcctgtgggtagatttaggagcagatgtggataagtatgatattctccgcaaaaaagaggataattaataattgttaaaatatagctgaatgataaaaaggaggtgctctatggcagatatgatcctgttgggactggcgatcatctgtactgcatattttatggttattgttttttatgcaggtatgggaacctcctttgcctttatctggcttttctttgctgctctttgtgtatttcttgtatatggaaaatggtattacaggaaaaatatggaccgcatcccacagtgggtgccggtgagcattgttactacctgtattgccggtgtggtcattatggcagccctttgtatcatggtgtttatgggagcggcagccagtgaagaaagggaccttgactatgtgatcgttttgggagccagagtcaaggaacatacagtaagcaattctttaaaaaagaggctggataaggccattgaatatgcagagaaaaatccggaaacctatctggtgctgtcaggaggcaaaggaccggatgaacctgtatcagaagcccaggctatgtaccagtatctggtatacaacggcgtaagacccagtcagcttcttttggaagaacattccgtaagcacagtggaaaatctggcatacagcaagatcatcattgacagccacagggaagtgatccgtcatcagagagaagaaagaaaccgcctgacatttcaacgggaaccaaaaggcggttatcttattgcagcggacaaacctctggatgtgggtgtccttaccagtaatttccatgtatacagagcctgcatgattgcaaaaaaatggggttttgaaaatgtctacggcatcagcgcccagtcagaccctgtgctgtttatccatttgtgtgtgcgtgaatgtgcatccatagtaaaggacagaataatgggaaacatgtaagggccccagaagaaaaacaagcgtctgcaaagcagacatttgtttttcttgggcccttaacgagcaaaccgtctgcgtaagcagacagtggagcgcgaagcgcgtgtttgcgagtctactaacgaacgaacaaccagcctgcgcaagcagacagtggagcgcgaagcgcgtgtttgcgagtctactaacgaacgaacaaccagcctgcgatagcaggcagtaaagcacgaagtgcgaggttgtgagtgaccgggacgcgacatccctcacgcaagggatttcccagcctcatggaaaaccaaacaagataggagaccaattcaaaatgaacagacagcagatgcttgaaaaagtagaaaacctttctgcctacgaggtaaaagaccgtcgttttgtagaagagatgaattccgaaggaatggtgctggaacatagaaaaagcggtgccagactgttcctcatgagcaacgaagacgacaacaaagtattttcaatcggcttcagaacaccgcctgcggacagtaccggactgcctcatatcctggagcacagcgtactggaaggttctgaaaagtttccggtaaaagatccctttgtagagttagtaaaaggttccttaaataccttcttaaatgcaatgacttatccggacaagaccgtatatccggtagccagttgcaatgataaagatttccagaacctgatggatgtatatttagacggtgtattccatccgtccatttacagagagccaaagatcttcaaacaggaaggctggcattatgaactgccttcagaggatgcacctcttactgtcaatggtgttgtatacaatgagatgaaaggtgctttttcctcaccggaaagcgtgctggagcgtttcacttcatcagtcctttttccagataccccgtacagcaatgagtctggcggtgacccggcagtgatccccaacttaagctatgagcagttcatccaattccacaaagactattatcatccggcaaacagctatatctatctttatggcgatatggatatggaagaaaagcttttatggctggataaagaatatttatctgcctatgacaaaaaggactttaccttagactcttccattgcattacagaagccatttacagaaccagttgaaaaagagaccacctattctgttactgcgaatgaaggtacagaagacaacacctacttatctctgaacacagtggtaggaacagatacagatccaatcctctatgttgcattccagatcctggactacacgctcatcagcgctccgggagcaccattaaagcaggctctgatcgatgcacatattggtcaggatattatgggcggctatgaaaatggtattttacagccttatttctctgttgtggctaagaatgcaaataaagagcagaagggtgaatttttatccgttgtaaaaggcactttgagaaaactggctgatcagggaattgacaaaaagagcctgttagcaggtttaaattactatgaattccgttacagggaagcagattatggttctgctccaaagggactgatgtacggtttatggtctatggacagctggctgtatgatgcagatccaatgcttcacttacagtatcagaagaccttcgattatctgaaaaaagcagcccaggaaggctattttgagcagcttatcaaagattatctcttagataaccctcatgaggcagttgtgatcgtaagccctgaaattgacctgactgcaagggaagatgcagaactggcagagcgtctggcaaagtataaagactccttaagcagtgaacaggtaaaagccctggtaaaagagacggcagagctgaaagcataccaggaagaaccttccacaaaagaggatctggagaagatcccaatgcttggaagagaagatatcaaacgccagtcagaaccgttttcctacaaagtaaaagaggaagagaaaaccacggttgtccacagtccaatgttcacttccggtattgcttatatcaaactgctttttgatatgaatgtgatcccgaaagaggatctgccttatgcatcccttttaaagtctgttttaggctatgtggatacagaaaattttacctaccgggatcttaccagtgagatccatttaaacagcggcggactggacttttatgtttcttcctgggaagacctgaatgaaaagggtgcttttaagggggcatttacagcaggcatcaaggttctttatgaaaaagtaggttttgcttttgacattatcaaagagatccttacagcttctaaattagatgatgagaaacgtctgggtgagatcttagatgagatgcgttccagatccagaatgcgcttggaaggcgcttcccacagcgcagcagttgcaagagcctgctcctatttctcaccggtaagagcctttgacgatatgacaggcggaattgaatatttccatttcctggaaaaaacagcagatgcctacagcaaggatgagaaattccgtaaggaactggtcagaaagttgaaggaaacagcagaaaaattgtttgcagcagataatcttatggtaggttatacagcagacgaggaaggctacaaggctcttccggaagaattaaagaaattcaaggctgcattaagtgataaaccaagcaggagatatgcttttgaatttgtgccggagctgaaaaacgaaggctttaagacctcttccaaggtaaattatgtggcacgctgcggttcttttgacgcagaagcttacactggtgccctggaagtattaaaggtcatcatgaactacgaatatttatggcagaacctgcgcgtgatcggcggcgcctatggctgtatgagtaattttggaagaagcggaaccggctgtctggtatcctacagagatccaaagcttgcagctacagataagatctacgaaggtatcccggaatatttaaagaacttctccattgatgagagggatatgacaaaatatgtgatcggtgccatgagcagcgtagatacaccattaagcccggcagtaaaaggttccagaaacctgactgcctatttatccggaattaccgatgaaatggtacagaaaaagagagaacagatcctggatgtgacccaggaggatatccgcgcattggcagatatcctggagtccatcttaaaaacaggtgctttctgtgtcattggaaatgaacagcagatcgaagcagataaaaacatgttcaaagaagtgaaagaactgtttcactaattcataaacagtactttatgagtacgtatatattaaacaggagaaaagaatggaagataacaaacagaaaaaatcaggttttgtaacactgatcggacgtccaaatgttggaaaatccacactgatgaaccacctgatcggtcagaagatcgcaattacttctgataagcctcagacgaccagaaacaggatccagaccgtttacactgacgacagaggtcagatcgttttccttgataccccaggtatccacaaggcaaaaaacaagctgggcgagtacatggtcaatgtagcggaacacacattaaaggaagttgatgtggtcttatggctggttgagcctactacctttatcggtgcaggagaacgccatattgcagagcagctttcaaaagtgaacacacctgtgatcctggtcatcaacaagattgacacgattaaagtgcaggaagagatcctgacctttatcgctgcttataaagatgtatgtgatttcgcagagatcgtgccattatccgctttaaaagacaaaaatacagatgtgcttttagaacagatctttaagtatctgccttatggacctcagttttatgatgaagatacagtaacagaccagccaatgcgccagatcgcagcagagctgatccgtgaaaaggcactgcgtctgttagatgatgagatccctcatggaattgccgttgtcattgaacagatgaaagagcgtccaaacggtattattgatattgaagcaagtattgtctgcgagcgcgagtcccacaagggcatcatcatcggaaaaggcggctccatgttaaagaagatcggtacagtagcccgccgtgagattgaaaacatgatggagaccaaggtcaacctccaactctgggtaaaggttagaaaagagtggagagacagcgagctttacatgaagaattacggatataatcagaaagacgtatagacgtatatataatagaaattgcatagacgtaagaatgtgcattaaatgacagatcttgcagattaaatgtactctcggagtcttttctgcacttgcctttgcggccgattttccgccatttgcacccgaatttcatcaacgtacgcaccgcgtacgcctcagaaatttgggcacaactgacaaaaaatcttctcgcaaaatcaagtacaaaaagattccgagagtacatgaaataagaaaggagggcgcagcatgcgggatgttttaagtgttacaggaatggtccttttaagcgcaccctccggtgactatgacagacggctggtgcttctgacccgggaaaaaggaaagataaccgcctttgctcatggtgtgagaagaccgggaagcagcctgatggcagcaagccggcctttttcttttggaacctttcaggtatatgaaggaagatctgcctacaatctccagtctgcccagatcaccaattactttgatgagttgtcagcagatatggaaggagcctgctatggggcttattttctggaagtggcttcctggctttccgatgaaaatatggacggaacggagcttttaaatcttttgtatgtgtctttaaaggcattaagcaaagaggctctgccaaatccgctggtacggcgcatttttgaacttcgtgccatggtcattaatggtgtgtatacacaggagccggaaggaagagtgtcggagtcctgcgtttatgcgtggcagtatgtgatcgcgactcccttaggttccctgtatacatttacactgaaagaagatgttttgagggaattttccagggaagtgcagcatgccatggatgaatacatacaccatgagtttaagtccttagagatcctggaagtgctctccgggggaaaaacggcccgtccggttagctgaaaatgagctaaagggcttgaaattatgccattcagaggatataatatgccatatgtctgaaaggaattaggaagagaatgaagaaaaaacttcttgcggcggctgttgttctgacagcagtgcttatgcttggaggctgcgaaggcttatctgcaaaaaacgcaaaaggaccggaaacagaagaaagctgtctttatattacaaaagatggtaaccttcagtgggtcagcgtggaaacgtatgaaggcggcagctattccaaagaggaacttttagactttgcatctgaaaagataaaggaatacaatgaagccaatgggacagaaagctcaaaagagccggtaactctggtttcaggaagtctggaaaagggaaaagcagttcttatcacctcttatgacagtggggaaagtcttgtggactttgccagtgaaataggagatgataccatgccttttacggaaattaaaaccggcacaccgaaggaactttcagaagatctgaaagctgcaggtgtggactatgaagctgctttggcgaccggttcctttgctgttgttttacagggagaaggaatggtccagacagaggctgacttgctggatgcagacggaggctgtgatgtccatgacggacattttataaagacaggttccggaacaagtgtaatcgtaactaagtaaaaatggcagtttgcagatgagtggtccacggatctgcagaatgcttgtaaagagagaggatactgatatggaaaagacaatggaaaaaatcgtagctcttgcaaaaaacagaggttttgtatatccaggttctgagatctatggcggtcttgcaaatacctgggattacggtaatctgggcgttgagctgaagaacaacgtaaagaaagcctggtggcagaaattcgtacaggaaagcccttataacgtaggtgttgactgtgccatcttaatgaactcccagacatgggtagccagcggacatctgggcggtttctccgatcctctgatggactgtaagcagtgtaaagaacgtttccgcgctgacaagctgatcgaagattataacgatgagcatggcattgagatcgaaggttctgtagacggctggtcccaggaacagatgaagcagtacatcgaagacaagcatatctgctgcccaagctgtggtgctcacgactttacagatatccgtcagttcaacctgatgttcaagacattccagggtgtaaccgaggatgctaagaatactgtataccttcgtccagagactgctcagggtatttttgtaaacttcaagaatgtacagagaacttccagaaagaaagttccatttggtatcggacagatcggtaagtccttccgtaacgagatcacacctggtaactttactttccgtaccagagagtttgagcagatggagcttgaattcttctgcaaaccaggtactgaccttgagtggtttgcttactggaaacagtactgcatcgactggctgcagaaattaggcattaagccagatgaaatgcgtgcaagagaccattctccagaagaactgtgcttctacagcaaggctactactgacctggaattccagttcccatttggctggggcgagctttggggtattgcagacagaactgactatgatctgacccagcatcagactgtatccggacaggatatgacttactttgatgatgagagcaaggaaaaatatatcccatatgtaatcgagccttcactgggtgctgaccgtgtaaccttagcattcctgtgtgcagcatatgacgaagaagagatcggagaaggtgatgtaagaactgtccttcacttccacccggctctggcacctgtaaaggtaggcgttctgccactgtccaagaagttaaacgaaggagcagaaaaggtatacgctgaactgagcaagtacttcaactgcgaattcgatgacagaggaaacatcggtaagcgttacagaagacaggatgagatcggtactccattctgcgtaacctatgactttgactctgaagaagaccatgcagtaactgtccgtgacagagacaccatggagcaggttcgtatcccgatcgctgagttaaaggattactttgctgataagtttatgttctaattgagatttaagttaaactttaaattaaaaatgcccgttttcctgttttggggaagcgggcattttgctatgtatattgagaacgcgccagtgacgtgttcgctgattttagaatgattttataaatgatagtgaggaagtatgatataatgagtccattggaggtccttacttatgaaactaaagacccgcttagcggttgcatttatgatcatcaccattgttcccatgcttcttatttttgtgtccttttttgccatcaatgatcatcaggcacgttcctttacaaaagagtatggtctgacggaacaggtggatcttttaaatggtaattctacccaggtatttaaccgtctgacccgccgggtacagcaggtgatccgggaagaactggataaaaagcctgaattatatgaagacagcagtcatttagatgaggtcaatgcggaacttcagaagcattatgcttatctggtagtgcgaaagggaaccgacatcatttattttggtgatgcagacgaggaaaataagacccagctgtgtgagcagctgccggaatttgatatccttcagggagatttagagggcggtatctacttagacggcgagagccagcatctggtaaagcagatggattttcagttcccggataagacagaaggaagcgtatttattatttccaatgtagatgatctgctgccggaagtaaaatccatgatccgggaaatgctctttttaggtgttatgatccttctgatcgccggaattaccctgacgttctgggtttatcagtctattttaagccccttaaacaagcttcaggaagctaccaagaagatccgcgacggcaatctggaatttaccctggatgtggacgcagatgatgaaatcggccatctttgccaggactttgaagaaatgcgtatgcgcttaaaagaaagtgcagaggaaaaagtccagtatgacaaagaaagcaaagagctgatcagcaatatttcccatgacttaaagacaccgatcacagctattaagggctatgtggaaggtattatggacggagtggcatcttcaccggaaaagctggataaatacatcaggaccatttataataaagctaatgacatggaccgcctcatcgatgagctgacattctattctaagatcgataccaacaagatcccatatacattctccaagatcaatgtttcccagtatttcagggactgcgtggaagaagtgggactggatatggaagcaagaggtattgaactgggatattttaactacgtagatgaagacgtagtggtcattgccgatgcagagcagatgaagcgtgtgatcaacaatatcatcagcaattctgtgaaatatctggacaagaaaaaaggtattatcaatatccgcatcaaggatgacggggatttcatccaggtggagatcgaggacaatggaaaaggaattgcagccaaagatctgccaaatatctttgaccggttctaccgcaccgactcttccagaaattcttcccagggcggaagcggtatcggtctgtccattgtgcgaaagatcattgaggatcacggtggccgtatctgggctaccagtaaagagggaatcggaacagaggtgcactttgttttaagaaaatatcaggaggttgtgcaggaatgagtaaaatactgatcgtagaagatgaggaaagcattgcagagctggaaaaggattatctggagctgtcaggctttgaagtagaaatagaaaataatggtacagacggtttagaacgggcattaaaagaggaatatgacctgctgatcctggatctgatgcttccgggaaccgatggttttgagatctgccgccgggtacgtgaggtgaaaaatacccctattatcatggtttccgcaaagaaagaagatattgacaagatccgcggactgggactgggagctgacgattacatcaccaagccattcagtccaagtgaaatggtagccagagtaaaagcccatatggcaagatatgagcgcctggtaggaagcggccagccggcaaatgagatcatcgagatccgcggtcttaagatcgacaagactgccagaagagtgtgggtaaacggggaagaaaagacctttacaaccaaggaattcgacctgctttccttcctagcacaaaatcccaaccatgtatttacaaaagaagagcttttctccaaaatctgggatatggaatccattggagatattgccactgtaacagtgcatattaaaaagataagagagaagatcgagtttaatacagcaaagcctcagtatattgagactatctggggagtggggtatcggtttaagatataatgagtccaagagaaaaacaagcgccgctaaaagcggcatttgtttttcttggaccattaacgagcattttgcctgtgcaagcaggcagtagagtgcgttagcacggaaatgcgagtgaagcatttggaataaaacaagcggctgcgaaggagacatttatttttcccaagccactaacgagcgttccgtctgcgtcagcaggcggaacttttttctttccagacacatcaaagaagcgtctggggcacgaataaatgcttttgtatacaatgcacattcgcaaatacgaaccaacaacggatatgtgaaaatgacagaaagtggaagcgcttacactggtttttacagtaaaattaacaaattttttcaaagttttgcctccaaaagggtttactgaaaaaaactttgtgatataataaacacgttggacggacgaagggagtcattggttccgccctaagttaagctaagtcggcaaacgtcaggtgaaaggggcctggcggactgctatatcagaggaggaaaagacttatggcaacaaagtgggtttacttgttcagtgaaggcaatgcaaacatgagaaatcttttaggaggtaaaggtgcaaacctggctgagatgacaaatcttggtttaccggttcctcagggatttacaattacaacagaagcttgtacacagtactatgaagatggcagaaagatcaatgacgagatcatgggccagatcatggaatatatcggaaagatggaagagatcaccggcaagaagtttggtgataaggaaaatccacttctggtttccgttcgttccggtgctagagcatccatgcctggtatgatggacaccatcctgaacttaggtctgaatgaagaagtagtagaggttctggctaagaagtccggcaatccacgttgggcttgggactgctacagaagatttatccagatgttctccgatgttgttatggaagtcggaaagaaatactttgaagagctcatcgacaagatgaaagctgaaaaaggcgttaagcaggacgttgagctgactgcagaagatctgcatgatctggctgagcagttcaaggctgaatataaagagaagatcggaaaagatttcccaactgatcctaaggagcagttaatggaagcaatcaaggctgtattccgttcatgggataacccaagagcaaatgtttaccgtcgtgacaacgatatcccatattcctggggtactgcagtaaacgtacagatgatggcatttggtaacatgggtgagacctccggtactggtgttgcatttacccgtgacccagcaactggtgagaagcacttaatgggcgagttcctgatgaatgcacagggcgaagacgtagtagctggtgtgcgtacacctcagaagatcgaccagttaaaggaagttatgccagaagtttatgagcagttcgtaggtatctgccatactctggaagaccactatagagatatgcaggatatggagttcaccattgaggacagaaagctgtacatgttacagacccgtaatggtaagagaactgcaaaggctgcattaaagatcgcctgcgacttagttgacgaaggcatgatcgatgagaagaaagcagttaagatgatcgatccacgtaacctggatacactgcttcatcctcagtttgacgctgctgcacttaagaaggctgagcctgtagctaaggcactggctgcttcaccaggtgctgcctgcggtaagatcgtatttacagcagaagatgcaaagacttggaaggcaaaaggcgagaaggtagttctggttcgtctggagacctctcctgaagatattgaaggtatgaaggctgctcagggtatcctgactgtccgcggtggtatgaccagccatgcagcagtagttgcacgtggtatgggtacctgctgtgtatccggctgctccgatatcattatggacgaagcgaacaagaagttcgttctggctggaaaagaataccatgaaggtgactggctgtctattgatggttctaccggtaagatctacgatggcattatcccaactgtagatgctaccatcgctggtgagttcggaagaatcatggcatgggctgacaaatatagaagattacaggttcgtaccaatgcagatactcctagagatgctgcaaaggctagagagcttggcgcagaaggtatcggtctttgccgtacagagcatatgttctttgaaggcaacagaattgatgcattccgtgagatgatctgctctgaaacagtagaagaaagagaagcagctctggagaagatcttacctgagcagcagggagatttcgagaagctgtacgaagctctggaaggcaacccagttaccatccgtttcctggatccgcctctgcatgagttcgttcctactgaggaagaagatattaagaaactggctgacgcacagggcaagactgttgaacagatcaaagctatctgcgatgcacttcatgagttcaacccaatgatgggacatcgtggctgccgtctggctgttacctatcctgagatcgctaagatgcagacaaaggctgttatccgtgcagctatcaatgttaagaaggctcatgcagactggaacgtttgcccagagatcatgatccctctgatctgcgataccaaggaattaaagtatgttaagaagatcgttgttgagaccgctgatgctgagatcgcagcagctggtgttgacctgaaatacgaagttggtactatgatcgagatcccaagagcagctttaactgctgatgagatcgctaaggacgctgagttcttctgcttcggtactaacgacttaacccagatgacttacggattctcccgtgatgatgctggcaagttcttaaacgcttactatgatgctaagatcttcgagaatgatccatttgcaaaactggatcagactggcgtaggcaagctgatggaaatggctattaagttaggaaaggctacacgtcctgaacttcatgtaggtatctgcggcgagcacggcggtgacccaagctccgtagaattctgccataagatcggactggactatgtatcctgctcaccattccgtgtaccgatcgctcgtttagcagcagcacaggcagctctggcagactaattgcagagatttaaaacaggctaatcgattaaaaattgttatataagggataaaagtgacagcgctgaaggaaacttcggcgctgttgcttttttgtatctttcttaataaatcttacggaagtttgatatttttgtgaaacgctttactgtatctggggaaaatgctatgatgaaaacaacgagtgccccgcctgccaaagcaggcatatcgcgtacaggcatgagtaaagcttatgatagcagaagaaaggaattgaaattaagaatgaagaaatggatgaagatctgcctgatggcagcagcatctgccatgttattagcaggctgcggtacaaaagataatacagcagagacaacagcagttgaaacaactgcaaaggcagaagatacaaaagaaactgagacagaaaaagcagaagagacaacccgggctgcagcaagtgaaacagcagaaactacagaggcagcagaggaaaacagtgaactggatctggcagcagctgcgggaaagcaccatgtagagatcactgtaaaagattacggcaccattaatgtagaattagacggggatgcagcaccgatcacagttgcaaactttttagatctggctggaaacggattttatgacggacttaccttccaccgcatcatcagtggatttatgatccagggcggtgacccattaggaacaggtatgggcggttccgagcgtgagatcaaaggcgaatttgactccaatggcgtgaaaaatccattatcccatacaagaggagctatttctatggcaagagcccagcgtaaggacagcgcaagctcccagttctttatcgtacatgaggacagtaccttcttagacggtgaatatgcctgctttggttatgtaacggacggtatggatgtggttgacgcgatctgtgaagatacaaaggtagaagacaacaacggaacagttgcaaaagaaaaccagccggtgatcgaaagcattaaggtgatcgactgacaggggagtttacaggtcaggtgctcaaaaaaggagtatggagtatgagaaaaaatgtaggaaaaaagaaactgcttttaacggttctgtcagcactgacattgtcattagctgcaaccataggtgcatttgcagatgaaagtgatacctcaaagctggtatccggcaccaagatcaatggcgtaggtgtaggtggattgacgccagatgaagcaaaagcaaggatcgaaggcttttatgctggggaatatacactgaatatcaaggaaaaaggcggaaaagaagagagcatcaaaggcagcgatattggctaccaggtgactgtttccggcagtatccagaatattttggacagtcagaatgccaccggccgtgtagcaggaccttccggtgaaaatacgcatacaatggaagtttctgcccagtataacgaagaggcgttaaacaataagatcagcaatctttcctgcatcagtggcggaagtattgtgacaacaaaagatgcttccatctctgcttatgaagaaggaaaagaatttaccatcgttccggctgtacagggaaatgatgtggacccggaaaagacaaaacaggtgatcacagctgttgtaagagccggaagcagggaactttccctggaagaaaccggctgttaccgtaccgttggtgtctgggaaagtgatgaaaacctgaaggctttatgtgcagctatgaacagccgcaggaccaaacagctgcggtatgtatttggagatgcgtcagaagtcctttccggcgagaccatggccagctggatcacaggaagcagcaatggacaggtaactctggatcaggaaaaagtcgcagcatttgtggcaaatctggcggcaacttacgatacagcaggaaagacacgtacctttacaggggtaacaggagcagaataccagcttacaggcccttatggatggaagattgaccaggcaggcgagatcgcagcccttactgagctgatccagagtggttcggcatggcaggatggtgacagtgcagacagggagcctgtatacagccagagtgcagtttccagaacaggtggtgactggggcaatacatatgtacaggtggatcttggcggacagcatgtatacatggtaaaagatggtaccgttgtctgggatgcgccctgtgtaacaggaaatgtgtcaaaggattatacaacaccggcaggtatctacagtctgacttataaagaaaaagaccgtatcctgcgtggaaagaagctggataacggcaaatatgaatacgaaagccatgtagattactggatgccatttaacggaggcatcggacttcatgatgcttcctggagaagcaaattcggtggaaccatttatcagaccagcggcagccatggctgcgtaaatctgccaccggccagtgcagcaactttatatgatctgctttacaagggaataccggtgatctgcacgccataaataaagagatgacgggagcagaaaccataaaaaagaatgtgccttggcacattctcgcgccgagcgcggtcgcttgcgacaaacttcctcatcgcgcgagtgcgcatcgttggcaggtcgtgcctttttgtgtactagggagttccaacggaatttcctagtacataaaataaaaacagatggaaccgacctggctccatctgttttttaaatgttttttgtttacttacggaaattctagggttcttcttctgtcagttcttcgtaatttaaggtttcgcctaaaggcgtatttttccagggaagaaccggttgcaaacggatctcaactgtaatgtccttccggttgtaaagcttgcggaagttgctgataatacgttttaagaccatttctcctttttcaatggttacagtaggcagtaagatcaggtactggctgatactgtaacgggtgaatacatcactgcagcgcagggaagccataatggaagtatttaagtgttccattgctttttgaaggatcatgctctttggagtttttccgtcgatccctgtaactgtcagcaggcagagataaatagagtctccggtacgctggatagaacggcgttctaactggaacagatccctgaaaataggatattcacagtagaaagccccgccgctgctttcctcgtttaaggaagtctggatagagtcaaggtttgtattgatgccacgttcactgttacggatgatattatacagctccttaaaatgttccgttggtgaaatggaaaattcattgtagaacaggtctaaggtattgctatattcttcaagtgcctggctggtatggccgtccttatataaggaatagaccaggtgataatgaaattcctcatcaaaaggctcgatcccaatagcagtctggcagatggaagtgatctgtccgtaagcctgtttgtccaaaagcagctgaatggtcttgtaaaccagcttctggtacagagagtgataataagcactgatgggaatgacccatgattcgtattctgattttggaaggaaatcacccttgtaaatagaaagaccctccatacacagggacagattttcttccggatcaagggagttgcttaaagcccggttgcatacagactcaaattcatcaatatctaaaaccgtaggataatcctgggtccaggcatatgttccccgctgctggactaacagtttctgcggggagatccctaacggctctaacagtttacgggaacggaacataagggtttttaatgctccgtttggattgacaccgggatcatcggcccagatgatacggatcagttcagcagggttgatatcctttttctggaatataacaagatactctaataatgcccagggcttttttgactgattgctgttgtcattgatctggcagccgtttgtgcggatagaaaaaccgccaagggtctgtacatggatcgttggtctctgttcagaagaagatggcataatggcaggtctcctttatatatcatttttatatcgtgcatttgaatttatacaataagtataactatacgctatggaaatgtccagtttattaagacgaaaaaacgaaaaaattaagtattttgtaaccgatttgtaaccggaaactgctatactgaaaatagtataaaacagaataataaacagaaagtgggtgaaaaaatgtcagtagcaaagactggagcaataccgaattcttatcgtcagatccatattgcagtggatgattttgaaaacaggatattaaaaggaaggatcaatcatgaaagtaaggagtatggcattgttttttacagcctttctgaaatggtgtttgctttagaggagctgtttgaggagatccattaccctatgaaaagtgtggaccaccgcaatttcagcaaaaaagaatatctggatctgaaagaggaaagcagggaagtaagaatagaaggattaaagtctgaaacaagaggaaaacttgcggatttttgcctgcgggtccagtatcgttattatgcttcctggcaggggcagatcgaacagatcggaacgaacgccaaaagacattttgacagctttatggaactgatggactttttagaccagcagttaggggaaggtgtaacaagacttccctatggacttggcaaaaagatgtgtgaagtcactgtaaacaattatgaaggtcatgtgatgagcggggatgtgtcccatccggcagtagaagacagacgggctttttataatgaatttgagctgagggaaaagatcgcggaaatgatcgatcctcttccggaacaggaaaaagaaccggcagtgatcatttcacgcagtttccgtgtggaaaatggaaattatagtcctgcaacctttgtagtccgggtgctgtttcgcaggaattctacctggcagggaacggttggctggaaggaaaaacgctgccaggtaagcttcagaagctttatggaactgctccttttaatgcatgaggctgtggcaagatccggacagtgggagaaagagcctgtaaagaagacacatacagcatgatcttttaaggaaaacatcttggaaaggacagaatgatgtatggaagacagtaaaaaaagcggcagagatactctgtggaaaatactggtctgcgttgcacttctggtatttttagtaagcggcggcctgactttgcgcagttatcttgcagataaaagagcccaggaagagtatgaacgccttgcaagggaagcagcccagacgacccaggagaccattacaatagaagaaacagaaaaacaggaactggagacagaacctgaaaaagaggaataccagtcaccctatgattttgatacattaaaaaaggaaaatcctgataccattggctggatccatattccagatacaaagatcagttatcctattgtacagggaacagataatgatttttatctgaaacatgattttaacggggaagcaagtgtagccggaagtatttatctggactacgaaagcgaaggtgactttgagggaagaaataatatcctttacggccacaatatgaagaacggaagcatgtttaaagatattgtccgctataaagacccttcttattttaaagagcatcagtatttttctatttatactcctgaacgggagatacgtttaaaggcggtatcctgctattatggagaggcaaagcccattgtgcgcaagacccgttttaagagtcaggaagcttttgatgagtttgtaaaagagatgatcgccccttgctcctatgcggaaaccgtagaatacccggtgaaagcgctgtatacatttgtaacctgcagctatgagatcaatgatgcaagaactttcttgttcgctgtggaggcagatgaacagggaaatgagatcacggcggatgaagagtatcagcagaaaatgacagacctgatgattaaaaaggcagaggaagcagaggcagtttctaaggaagctgggaaaaagtaggaaaatatagtggaaaatatggcctgttaaaataaaaattactattggaaaagcggagcagttatgctatactaagcgggaaaatgctgatttatataaaaatcagcagtcaggaaggctgtttcgcgaaagaagccaaggaaaacgaagaagtcatacctggtaacaggtatggctttcatttatggtgatgttaccgccaggtgacatgtctgtttgttataaggacaggtattttttgataacagactttcgaaatacaggcaaaaggagagaacaattatgaaaagaaatgtaatgagaacaatgagcctggcatttgctggaataatggcagcaggtgcattaacagcatgtggcggaaataatacagcagctactacagcagctccggcagagcagacaagcgcagcaggagaaagcgcagctgaagaggctacagcagcttccggcgaaaagaaggttttaaaggtagctatggagtgtgcatacgcaccatacaactggacacagccagatgattccaacggcgctgtaccaattaatgacagcaacgaatatgcttatggatacgatgttatgatggcaaagaagatctgtgatgagttaggatatgacctgcagatcgttcgtcttgactgggattcactgatccctgctgtaagcactggacaggttgactgcgttattgccggtcagtccattactacagagcgtcttcaggcagttgattttactgagccatattactatgcaaccatcgttaccctggttaagaacggcagtaagtacgctgacgctaagagcgtagctgacctggctggtgcaacctgtacttcccagcagagcaccatctggtatgatacctgccttccacagatccaggatgcaaatatcttagctgcaacagcaagtgcaccagatatgctgatgtccttaaatgctgacaagtgtgatttggttgtaactgaccagccaaccggtaagggtgctttagttgcttatccagatttcaagcttcttgaatttggcggcggcgaagatgatttccaggtaactgacgaggatatcaacattggtatttccttaaagaagggcaatactgagttaaaggaagctattgacagtgttctgtccaagatgacaaaagatgatttctctgcaatgatggatgaggcaatttccgtacagcctctggcaaactaattgaagagataaaaaggagaaagttatgccaacagattttttgggccgtgtaatggtcgtattcaaccgctacggcatgtctatgttgcagggtgcaggcgtcagcttaaagatcgctttagtaggtacgctggtaggatgcctcatcggctttgccgtaggtattgtccagaccattccttctgaaaagggagacaatcctttaaagaagggagctttgtggatcatacggctgatcttaaatgcttatgtggaatttttcaggggtacacctatgatggcccaggctatgtttatctactatggccttatgcctttgctgggaattaattctactattacccaggctgcttattttatcttatctattaatacaggtgcctatatggcagagactgtacgaggcggtatcctttctattgacccgggacagactgaaggagcaaaatccattggtatgacccatgttcagactatgatctacgttatcctgcctcaggctctgcgtaacctgatgcctcagatcggcaacaacctgatcatcaatatcaaggacagctgcgtgctttctgttattggtgtggcagaactgctgtataagacaaaggcagctgcaggcgccctttacatgaactttgagacctataccattaccatgatcatgtattttatcatgacatttacctgctccagactgctgcgtctgtgggagaagaagatggatggtgcagacaattttgacctggcaaccacagatacactggcttataccagtggtatgtaccgttatccggatgataagaaggaggagcagtaatgagcgaaaagattttggagatccgccatttaagcaagacctttggcaccaatctggtcttaaaggatattgattttacagtaaacagcaaggatgttacctgtatcatcggagcttccggttccggtaagtccaccttgcttcgctgcttaaacttactggaaacaccgactaccggcgagattttatatcatggaaataacattgccgatgcaaaggtaaatgcaccgaaataccgttccagagttggtatggtattccagagctttaacctgttcaacaacatgaccgttcttgaaaactgcatggtgggacaggtcaaggtgttaaagaagggtaaggaagagtcaaagcagaaggccatgtattacctggaaaaagttggcatggctccttatatcaatgcaaaaccaagacagctttccggcggtcagaaacagcgtgtagccattgcaagagccctggctatggagcctgaggtactgctgtttgatgagcccacatccgcgctggatccccagatggttggagaggttctggaagttatgcgcaagcttgcaaaagaaggtctgaccatgatcattgttactcatgagatggcatttgcaagagatgtatctacccatgttgtatacatggcaaacggtgtcatcgtagaagagggaacaccggctgatatttttgcaaatcctcaaagagagcagacgatggaattccttggaagatttatgcatgagaaataaaaagaatgagaaaaaagcctatgcaggctgcctgaatggcagctgcatgggcttttttatgtattatacatatcccgaatgcgccaacagcgcatttgctggttgaaatggaaatgcttatctgtttggtttaacccttcagaccagaggtactaattccttctaccaggtatttctggaagaaaatgaagatcagtacggatggaaggatggaaaggcttgccattgcgaacatagcgccgtagtcggaagaagaacctgggtcgcagaacagttttaatgccaggctgaccggatacatggcggttttgttgatataaagcagggcggaaaggaaatcatcccatctccacataaaggagaagatgcagccggttacaactgccggtttgatcagagggatcatgatccttgtaaagatgccccagtaggaacagccgtcgatctttgctgcttcgtccagttcgatcggaataccgccgatgaagttggaaagcaggtatacgaaaaatccctggatcgcgaagaagtatgggacagtcaggggaaggaaagaaccgacccagcctaatttctggtaccacagatactgcgggatcataagaacctgtgcaggaagcatcatggataacagcattgcggaaaataaaattccttttccacggaacttaaatcttgcgaaaccgtaggctacaacagcagaggaagcaatggttccaatggtagcgatcacggagatgaagatagagtttttaaagaaagtggagaaagagatctttgcaaatcctttccagccgtttgcgtagttatccgttacaaaatgttccgggatcagggaactggcggttgtgaaaatggtgttggtctccttaaaggagctcataaccatccagatcagaggatagaccatgatgataccaatggcaaatatgatgatgtggtagagcgcagctcctgccagacgtttttccttcatgtctacagtcctccttcatatacccagaaccgcttggttgcaaacaggaacagggtgatcagtccgatcatcagcagcatgacccaagccatggcagcgccataaccagtgttgtaaaactcaaatgactgctgatacatataaacggtgtaaagcaaagtggagttcattggcttaccctgtgtaatgatgtagcactgggtaaatgccagaaatccgttgatcatctgcataaccaggttaaagaaaatagttggtgtcagcagaggaagtgtgatcttaaagaaacgggatactgggttggcaccgtctaccatggctgcctcataaagagaagtcgggatctgctttaaagaagataagaagatcagcatggaagaaccaaactgccatacagctaacaggatcaggatccagatggctgtttttgtatcacctaaccaggaaatactggttttaataccaatagaacctaaaagtttatttacaacaccgtccatagcgaacatacgcttccaaaggatagcgactgctacagaacctccgataatggaaggcagatagtaagctgctctgtaaataccggacattttggtgttttttaacaggagcattgcaaccagtaaagcgaagatcagctttaaaggaacagatacaaaagcaaagaagaaagtaactttgatggtctgtaaaaaagtaccatcagcgatcatatttttaaagttatcaagacctgtaaaaacaggcggggacaaaatattatatttgcaaaaggaataataaagggaaatgcccatgggaacgatcataaagaagagaaagcccagggtaaagggaagagtaaacatgatgcctgctgtatcttcccggttaaacaagctgcgaatggttttcatgtcaaacctcctgtttttggatgtcttgggataaaagatagtttacaatggttcagggcgggaggaccgccctgaattataaaaggatatggtaattaaaaagagagtaatcaataaaagtagatacgtttacttggaagctttggaagccataatggagttgccctgctcaaagagctgtgcgcctgcatcttctgcggacagctgtccgtagcatacctgctcttccagtttgttgatcagatcgtttacttcactggaaccatcagcacttggtggatttacctgtgaagagtgaggatctacaacattgtagatgaagtcaattacctgctggctgctttcatccaggttagaagaaatagcttctgctacatcactggacagcgggattccacgttcagcaagaagtacattgttgcagtctgcagagtttgtgatgtagtttaagatctttgctgcttctgcaggatttttggagtcagcagagatagcgaagaactggcttggctttaagtagtcagatttttcaggatctgcagatggccaggtggtgataccaatctcagtgccttccggagctgcgttcttgatcgcagttaactggttggagtaggagaaagagcaccaggacatggtctcaggactggaaccatatactaatggatcctgttcaacagaaccgatggtacgctctgcaaatacagaagggtcaacgacccagccatctttaataccatcttcatacagtttgaagaagtttacatatggttcagcggactctccgcccatttttccatcctggtacagaacaatgtcatctgcacgaaggaagtactctaagaactgctcgttctggttgtagcaaaggttggtcttgtaaccggttttttcttcgatttccctggaaagagcgatgaactcatccatggtcatgttgtcttttacagtgataccgttttcatcaagtaaagtcttgttgtataacagagctggtgcattgataccattgcacagtgcatataagccatctccaaccttaccggagtttaaaacatcctggttgcagcttgctgtatcaatggttccgtcctcaatgtaaggagtaagatcaactaacagattgttgtttacatactgctgtaaatatttgtagtccatctgaacgatgtctggcatggaatgtcctgctgctgcggttgccagtttgttccagtagtcgttgaattcggagaactgtccgtcaatggtaacaccaggattttcttcgctgtacatgtccaggatcttctgggtacgttcatttctggtctgatttccccaccatgccataaccaggctggaggaatcactgctgccgccatctgactgtgcagactgggaagtgtttgtatcagctgcgctggtgtcagagctgcctgaggaagaagatccgccgcaggcggttaaagatgcagcggcaagagctgcagtaagaaggactgctaatttctttttcataatattgtaacctccttgaaattggatcctttcgtggtccgaaaggatatctgcttgtttatgttccacattatagcgcataatttttttgttcttaatagttaaaacggagcagttcgttcaaaaaaccgacttcttttttgtgcagaattgaattatttttgaaaaaaagtataatgtgaatgtcaggagatatacaataattaaggaagaaacgggaaatatatgaaaaaaaatatacgcatattaattggccggttcaggcactggtctttaaaatataagatccttaccatagtgctttttaacagtgtgaccatgctgttatgtgctgtgtttgggtaccggctgtatacaaatgcctataataagcttctttttgactctatggcatccagactttccgtgacatcagctcagatttcccagaaaatggaaaatgcagaatatatttctaatctgatccttggttcttcttctattcaggattgtctgtcagatcttccgtcaccggaagacgcgccggcgatcacagaatataaccgtaccattaataatgcccttacagaatacgcaactcttttccggtccaatggcattgcttatgcagctgtttacagcaaaaacggggaatatgtgaactgtaccaactgggtcacgttaaagcggacacccggttttttgttagatgcagcaatacagaacggttatgagaaagagggagcagttacctggacccatgctaccaggcagccttatatgcttctcagcaggaatgtacgtcagatccggaacatgtctttggagcctttgggaaatatggtgatcggcctggacctggaacaggtagtatctgaggcagtccgttttgcttcccagtataaggatcagaaagtggtgatcgccaatcagagcggaagcctgatctatgcttcctcttctttaacggatcagagggcagaggagctgattacagatccttttactacctataagatcgtttcttatgatggtcataaatattttgccgtgaaaggaacgcttccccattatcagtacagttatgtgacactggcgccctttgatgaagttgcaggtgcgcttaccgtttccatgcagactacatttatgatctttctggttgggattttgtttatctggtatctttccagtcgtctgatccgggggatcatccgccagtttgatgccctgatccagaaaatgaaactgtttacccagaatgagctggaactggaaccggaggaagaggattacggatcacagcctaatgagatcggcgctttgcaccatcagtttcatcagatggcattaaggatccaaaatctggtaaaggtcaattatgtaaatgagatcctggcaaaggatgcgcagttaaaagcgctgcgttcccagatcagcccccattttctgtataatacactggaaacgattaactggagagcgaaagccatgggaaatgaagtgatctcccagatggtagagtctctgggaaatcttttaagagtttccctttccagccagaagaccctggtaacactggcctatgaactggaactggtagactcttatatcaccatccagaagatccggtttgaggaacggctggagtttaaggtgatcacagatgagaaagcaaaagagggaatgatcccgcctcttaccattcagcctctggtagaaaatgccattcactatggcatggaagaaatgacggaggtgtgtcatatttatttgcaggcagaggtaaaagagggagttcttacgatccaggtgagaaatgaaggttccaattttgaagaggaattgctggaaaaattaaaaaataaaagcagaagccctcatgggtttggaattggtctgttaaatatcgaccagaggatccggcttttatttggggaagagtatggacttacattatcaaatgaacatgattttgcagtggcaacaatcaaaatgccgtttcggaaggaagaagagacatgctgaaattactgattgcagatgatgaacgtattatacgagagacgatctttaatattattgactggaaaaaacatgacattgaagtgatcggactttgtaaaaatgggatcgaagcctatgatatgatcctggatgagtcaccggatatcgtacttacggatatccgtatgccaggtatgggaggcttggaactgatccgcaaaatccgtcagactgacctgcagatccagtttattattttatccggttatggggagtttgagtatgccaaggaagccatgagctatggtatccgccattatcttttaaaaccatgtaatgaaacacagatcctggagtgtattgaacagtgccgggaagatcatgaaaaacaggccagagaacggaaaatgctccagcagcagttcgttctctatgatggaatgttccacagtgtactttccagtatcatcaatgactgtctggatgaaaaaatgacgctggaggagatcatttctccctatgaacagtatctggattttcattttgcagcctaccgtctgttttatgtgtattatctggaatttcagggtctgccgtcttttttacagcagttgaaagcatatatggaagaaaaaatgccccagaccattctgtatggaatgtatgtaaaaaataccctggtgctgtttatgcagaatgcaggtaaagcctgtgacgatcttcatgtgtttttgcagcagctttcaccggaggggcagaagatcacaacagagatccgggaggagaattattcttctttaaagacacttcttacccaggtaacaggaaaacttctgcgttacagcatgatctattacataaaccattttcatattacagctatctgtaattataactgggtcattgatcagatccgtgttctgtatcagcagattcaggagggcaaccgggaaaagacggatcaggcggtggaactgttaaacagtattgataatatagactttttaaagcagctggcaggaaatctgtttttgaaaatggcttcggattttcagacgttttccactgtagatctggcccagtggctgactaagatggaaaaagaagaagatctggatcttttaagaacgatgatctctgacaaattccgggacctggtaagtttaaaagaaggagaagagacagtttcacctatggtatcccagatctatgtctatgtggagcagcaccttcaggattcggcccttacgctaaaatggatcgctgaaaattatttatttatgaatgtagattatgtaagcaagaaattttacaaagaaaccggacagaaattttcccagtatcttacaaaaatgcgtattggaaaggccaaggaactgatcgcaaaaaatccggaggaaccgataaaaaatgtagcggagcaggtaggctgtggaaacaatccccagtatttttcacagctgtttaaaaagcagacgggaatgacgcctacggattatattacttctttgggacactaagcagtttataaatggaaaaaaccgtaaaattgtgaaaacacggaaatgtggcagaacgacacggtttttcggattgactattttggataaaaatggaaaataaaatcatatgatttatgatcttattttaaggaggcaaaggcaaaatgggatatcgtgttatggagctgggggcagcaggtgatggaaagaccaatgatgcccatgttatacagaaagccattgacctgtgcagtgagcagggcggtggtgtagttataatggaaggaggtcacacctatctttccggttccatcgtattaaaaagtcatgtagaactggtggtagaaacaggggctgtacttaaggccagtgaagatctgaatgattaccagtatatcagtgagctggcaaagcggggacatgaccatatggtagaagttcctacttttgtaaactgcgagtatgatggaaaaccgcggcagtattttatctattccagggatacagacggagtacgcatcagtggcggcggtgtgatcgatggttcagaagaaatttattatggagaggtaagagaagatcagatcgatggtgccttctatcctcgaattcctctgatcctgatggaacactgtacccatctgaccatccagaatgtaacgatcagaaagagcggattttggaccactcacctggttggatgtgaagaagtggagatcagcggtgtccgtattttaaataaccgtatgatggcaaactgtgatggcattgacccggaccactgtaaacatgtacgtatcagcaactgccatattgaggcagcagatgactgtatcgtattaaagactacagaagcaaatcatcactatggtccctgtgaagatattgtgatctccggctgtacactggcatctaccagtgctgccattaaaatcggtacagaaagtgtagatgattttaaggatatcatcattgataactgcagtatttatgatacgaacagaggtatttccttccagttaagagaccagggaaatattgaaaatgttctgatcaataattgtgtgatccgtacaaaaaatgtgtctgagtgctggtggggctttgcagagcctatcaatattgcttccatcaacaggaaagatgagatcccttccggaaagatcaaaggattatctattaccaatgtgcgctgcaagggcgaaggcagtatttatattgcaggaaaggacagtgcgcctatagaagatcttacattaaataatatccgtctggaactggaaaaaactaccaaatatcctattaaaggatatgatttccgcccatgctgcggtccggatttccaggaaggaaagatcaatggcatctatgtgaagaatgccaagaatgtgaaagcagaaaatctggaagttaccgttcatgataatatgaaggaatgggtagacaaagagatctgctttgaaaatgcagttgtaaaagaaaaatgatcttatggtttctgcgttttctgtgctttggtgatatagggataaatatcctcatatgcttccacctctgcttcgtcctgtggcagtgccgggatcaggccggtgcagtcggtggcggagcaggcctggatgtctgagtcatcaaagagattttcagccgtattattttttagatcagaattgtctttgaaattatatttttccataaaaaaacacctcctgtaaacagcttttggatcagtgatctgtcttgctgtaaacaggatgtgtttttttaatagtttttattcagccaggtttttaatttactgtttattatttgtcctgattttttaaagatgcctcaatgaatcccttaaacagtggatgtgggcggtttggacgggacttcagttccggatgagcctgggttcctacgaaccatgggtgatctggcagttcgatcatttctacaatacggttatcaggagacataccggataacatcatgccatgctctgtaaggaaagtacggtaatcgttgtttacttcataacggtgtctgtggcgctcatggatggtttcttcgccgtaaagaccgtaagccttggaatttttatccagaacacatggataggaaccaagtcttaaggtaccgccgatatcttcgataccgtcctgatctggcatcaggtggatcacaggatgagtagtagcaggatccaattctacgctgtgggcgtcattccagccgatcacatctcttgcaaattctacgatggaaagctgcatgccaaggcagaggccgaggaacggaatctggtgttctcttgcatagcggatggcgcagatcatgccgtcaataccacggtcgccgaagccgcccggtaccaggataccggaaacatctcctaatttttcatctacattttcagaagttacagtctcagagtctacccatttaatgtgtacctgtgccctgttggcaacagcaccgtgcttcaatgcttctacaacagagatataagcgtcatgaagctgtgtatattttcctaccagcgcaacggtcacatctttttcaggatgcttccatgcatcgatcatagcggtccagtcttttaagtctggttccgggcatggcagatttaagcattcgcaggcaacctgtgccagatgctcttcttccattacaagaggaacctcgtaaagaacttctacatccaggttctgaagaacatgggtctttggtacattacagaataatgcgatcttgctcttgatattgtcatctaacggatgctcggaacggcataccaggatgtccggctgaattcccattccctgcaggtcttttacgcttgcctgggttggtttggtctttaattcttcagatgcttttaaataagggataagggtgacgtggatgagacaggtgttgcctgggccaacatcatgctggaactggcggatcgcctctaagaatggctgactttcgatgtcgccaacagtaccgccaacttcgatgatggcaatctcggtttcgttatcattataattgcggtggaaacggctcttaatttcattggtgatgtgggggatgacctgtaccgtacctccgccaaagtctccacggcgctctttctgcagaacggtccagtaaactttaccggtagttacgttggaatttttagtcaggctctcatcgatgaaacgctcataatgtccaaggtcaaggtcagtttcagcgccgtcatcggtaacgaaaacttcgccgtgctgtaccgggttcatggtacctggatcgatattgatgtaggggtcaaatttctgcatggtaactttgtaacctctggcttttaaaagacggccaagggaagctgcggtaatgccttttccaagtccggaaacaacgccgccggttacgaatacgtattttactggcatagtggggaacctccttttagtggtaagttgggtataggtttttgtttacggttttattaaaaactgatatattatacaactatggaaatcagaaatctagggacttttttcaaaaaaatgtaaaaatcttaaaaaactaataatctaaagtggagatgaaggggaagatcctgcttttgttttcagaattttaatagttctttccttgatttatggttagactcacattataatagaaaagaataggctctggcacattttatgcgtgcacgaaaaagcctgttagagggagaatttatacagtatggataataacaacaaacagaatcagaacagtaattggcaaaccattaccatgctggtgatcgctgcattgctgacgatcctgatcgtgggctggatgaactccactgtcaacgccagacagcgtcaggaactgtcttacaatgagtttgtaaacatggtagaaaatggcaaggtagagtccatcagcgttggaagcaccattattgaggtaaagccaaaggcagatgacaccaactattcccagcagatgaagtactatgtagtacgtctggaaggagattaccagtttgtagaccgtattttaaagaacaacgttgttacaaacagggaaaataatacttccaatgcattactgttagaaatattaagttatgcacttccattcctgttcctgctgtttattatgaactttaccatgaagcgtatgggcggcggcggaattatgggcgtaggcaagagcaacgccaagatgtacgtccagaaagaaacaggaattacttttaaagatgtggcaggtgaagatgaagcaaaagagtctttaactgagatcgtggatttccttcacaatcctggaaagtacaccaagatcggtgcgaagcttccaaagggtgccctgttagtaggccctccgggaaccggtaagacccttcttgcaaaggcagtagccggtgaagcacatgttccattttattccctgtcaggttctgactttgtggaaatgttcgtaggtgtgggtgcatcccgtgtccgtgacctgtttaagaatgcaacggaaaatgctccttgtatcatctttattgatgagatcgatgccatcggacgcagccgtgacagccgtatgggcggaaatgatgagcgtgagcagactttaaatcagctgctttctgagatggatggtttcgactctacaaagggacttttagttcttggtgcaaccaaccgtccggagatcctggatccggctcttcttcgtccaggacgttttgaccgccgtgtagttgtagataaaccagacttaaatggacgtatcagcattttaaaagtacattccaaagatgtgctgttagatgagactgtagactttaaggaaattgcccttgcaacttccggcgctgttggtgcagaccttgccaatatgatgaacgaggctgccatcaatgcggttaagaacggcagaaacgctgtttcccagaaggatctgtttgaggcagttgaggtggttcttgttggtaaggagaagaaggaccgcattatgagcaaggaagagcgccgcattgtatcttaccatgaagtaggtcatgcattagtcagtgctctgcagaaacattctgaaccggtccagaagatcaccattgttccaagaactatgggtgctttgggatatgttatgaatgtgccggaagaagagaagtatttaagtaccaagaaggaattagaggcaagactggttgagttaatgggcggccgtgcagctgaggagatcgtttttgagactgttaccaccggtgcagccaatgatatccagcaggctaccaatctggcaagagctatggtgacccagtatggtatgtctgagaaattcggtcttatgggacttgagagccaggagaaccagtatctgaccggccgtactgtattaaactgcggtgatgccacagcagcagacattgaccaggaagttatgaagatcctgaaaaatgcttatgatgaggcaatccgtctgttaagcgatgacagagaagctatggataagatcgcagcgttcctgatcgagaaagagaccattacaggtaaggaatttatgaagatcttccgtgaggtgaagggattgccggagccggaggagaagaaggaagacggcgaaggtattccggatacagagcatctggagaaagaggatgcagctgaaagtccggagacagctgttgcagaagaaaaagaaaatgaagcaggtgcagaaaatattgtagcagatgcttcagaagaaaagccagaccagtctagggaagaccagcaggtataaaactgaaaatggatctgtagatcagtgaggacagtcagaaatggctgtcctttttgcataaaagtcttgcgaatataatcttggttttgtataatattattaaaaaataaggggaatatcagtaacttttctgaaaaggaggcacatttatggataatcgttatgtaaagatctttgcatcgggaagtaaggcacctcttaaggcaacaccgggacattttgctaccaatcatgcccatattaattattatctggacatgaccacccttaagacaagactcagtgaagcacaggaggttgcaaagcacctggcagagcggtttttatttgacaaggtagtggatacgatcgtgtgtctggaaggaacccaggtgattggagcttatctggcagaagagctgacaagggccggtgttctttctaccaacgcccacaagactatttatgtaatcactccggaatataacagcaacagccagatggtatttcgtgagaatattttaccgatggtccatgggaaaaatgtggtgatccttacagctgttgtgacaacgggactgagtctgaataagagtattgaggcgatccagtattatggcggaaaactgcagagcgcagcggctgtgtttagtacactggatgagttaaacggatgcccgatcacatccatctacagcccggaggatgtgaccgattatatttattatgattacagaaaatgccctctttgcgaaaagggaataaagctggatgcactggtaaatgcttacggctatactacacttggataaagtgaaacaggatattaaacgctgttcaggatgtctttggggcgtcctggatagcgttttttgtatgcacgtaaaaaggaggaatagttctggaaaccgcagaggtagcaggcctgtgtggcgcaggtgccctggctcatcaggtctcttgccttgatcagccgcttttccgtaatgtaatttccaaccgtatagccggtttcctgtttaaacaggcgcatcatgtgataggagcttaagccgcttaaagcagaaagggaagctacgtccataggctcttccaaatggctgttgatataggccaacaggccggaaatgcggtaatccagggtgctttctgtgagaaatccggctttgggggagagggtgatcctgtttaattcgatgagaaattccaggcacagggcttttgcaagtaagggagctgcaaaatcatcatttctgaaattggtgtttgtttctaatttctgaagcaggactttaaaaggagccagcgtttcctgggaaaggcgcaggacctgggaatggcggtactgggcagtttcaaagcacctggtcaaaggtgcttcttttgtgctgtatgtttccagaaaagtgggagagagatagagcaggatgcgctcatatggatgggcggtatctactaccggccggtgtacctgcccgcggtctaccaggaccatgtcccagggagccagtggataagaacggccttccaccacataggtcacatttccggaaagaaggatcattatctttaaaaaatcatggtgatggaagctgtaagtccttgaagtcagatcttttaaatggaaaaggcggaaatcttctaaaaggtagccctggagcgtggatggggaatttgtcatggaaaatctcctgtattcattaagttcgttattatcatttataatagcattatttgcaatataatacagcattaaatgaatatatttatgaaataatgtggcatataatgagtgtagaagaacaggggaggtaaggtcatgcgattaaaattagagaaatatcacggtttgggaaatgattatctggtatttgatccggaacacaatgggatggaactgacaccggagagagtaaaattactttgcaaccgcaatcttggagtaggggcagatggtattctggaaggtcctgtttttaaagagggaaagatccatatgatcatctggaattccgatggaagccagacagaaaacagcggaaatgggatccgtatttttgcaaagtacttaaaagacgcagattatgtccagaagaaagacattaccatttatacagatgaaaaagagatcgagatccattatttaaacgaagaggggacccgcttaaaagcctctatgggaaaagcaagtttctggagtgatgaggtgccggtagaaggtccccgcagggagatcatcaatgagaccatggtatttggccacattccttatccggtaacctgtatttcggttggaaatccccatctggtgatcttaatggatgagatctcaaaggatctggtatgcaggatcggtaaatattctgagacagcaaagcagtttccggaaaagatcaatacccagatcatcaaggtgttggaccgcactcatttacagacagaagtttatgaaagaggtgcaggttatacattggcatccggaagcggctgctgtgcagcagctgcggcagcttacagactgggacttacagatccgaaaatgatcgtgcagatgccggaaggtaccatggaagtagagatccgggaagacggggagatctttcttaccggcgatgtaggttatgtgggaagcatcagcctgggaagttattttacagaacagttgaagctggtataggctgatatcgcctgttgacaaataaaaattctactgctatatttaaaaaaaaaggggcagttgcaaaatgaacggttcactttgcagctgcctttttgttgttatacatctgaaagaagctgccggtggcaggttctgtaagtggtatagataaaggcacaaaagcccccaggattttgtcagatgcatgggaaaacggctgccagagaggaagaatggatatgagtaaatacagtagggaagacattattcgcatggtagaagatgaagacgtagaatttatccgccttcagtttacagacattttcggtatccttaaaaatgtggctattacagccagtcagcttaataaggcattaaataatgattgcatgtttgatggttctgccattgagggctttgtgcgcattgatgagtccgatatgtacctgcatccggacctggatacctttgagatctttccgtggcgtcctcagcagggcaaagtggcaagactgatctgtgatgtatacaatccggacggaaccccttttatcggggatccaagatatgtgttaaaacgggctgtaaagcgtgctgccgatatgggatatacgttccaggttggaccggagtgtgaatttttcctgttccacacggacgaagagggaaggcctactacccagtctcatgagagagccagctattttgacgtttcccctattgatcttggggaaaatgtgcgcagagatattgtgctcaatctggaagatatgggctttgaggtggaagcaagccaccatgagatcgctccggcccagcatgagatcgatctgcagtatacagaaggtcttgaggcagcagatcacattatgacttttaagatggcagccaagaccattgccaagcgccatggacttcatgccacttttatgcccaaaccaaaggaaggagtcaatggctccggtatgcatattaacatgtccctgtccgacgaggacggacacaacctgtttgcagacgacagtgatgagctgggattaagccagctggcttaccgttttatggcaggtattttaggacatatgaaggaaatgaccattctgaccaacccacttgtaaactcctataagcgtctggtaccgggatatgacgcgccgatctatattgcgtggtcaccgacttccaaccgcagttccctgatccgcatcccgtctccaagaggagaaggaaccaggatcgaacttcgctgcccggactctgccatgaacccttatctggcactggcagcctgccttcaggccggtcttgacggcattgagaaagagatggagctgcctccatgtatccagggcaacctttttggcatggagccggaaacattaaagaataagcatgtggaacggatcccggaaacactgggggatgctattgaggcataccgggataattcctttatccgtgagatattaggcgagcatatttatgtcaaatatctggaagcaaaagaagaagagtggagagatttcagggcccaggtcactgactgggaggtaaatcagtacctgtataagtattaaagttacagttcagccatgcgctggtttggatgagaaagcgtgttgcaagtttacttgcataagcactttttcatccaaatcagcatatggtggatccaccaagcttcttgttttcatgaatatggaaacaagaagatgccatggctgaattgtaaacaacagttaaaagcaggaaaactaagtttacccggaggtgagacatgtggctaatataatcgtggcattttccaaaccggaagatggaaaaagcataaaaggtattctggtaagaagcggatatgaagtggctgctgtctgcatgtcagggtcacaggttctttcagctgcggaagatctgagcggtgggatcgtagtctgcggataccggtttgaagatatgatgtacgacgaactgagacagtgcctttcttttaactttgagatgctggtgctggcatctcctgcaaggtggagcgggatacagatgtccggggtggtatgtcttcctatgccccttaaggtgcatgatctgttaagtacgctggatatgatgctccaggcgcagcagcgcattcgcaggaaactgcgcagcaggccaagggagcgcagcaaggaagaacaggatctgatcaatgaggcaaaggcgcttttgatggatcgtaacaatatgacggagtcggaagcacacagatatatacaaaaatgcagtatggacagtgggaccaatctagtggaaacggcccagatgatcatcagtctgatccacgtataagagaatgcaggataacatatgaggtgtgagatggaatttacaaaaatgcagggaattggcaatgactacgtgtatgtagattgctttaaggaaaaagtggaacatccgggggaagtgtccaaatatgtcagcgaccgccattttggcattggttctgatgggctgatcctgatctgcccgtctgataaggcagactgccgtatggatatgtacaatgcagatggttcccagggaattatgtgtggaaatggtgtacgttgtgtaggaaaatacgtgtatgatcatgggatcgtagataaggacagacggaccattactgtggaaacattaggcggtatcaagacattggatatccaggtagaagacggaaaagcagtgatgctgactgtagatatgggagaagcagaactgacttccaaacttccggaaaagatcgtaattgacggtacagaacaggaatttacaggaatcagtgtgggaaatcctcatgcagtctattttacagaagggatcgatgacctggatctggaaaagatcggcccgtcctatgaaaatcatccacgtttccagccggcccgtgtaaattctgaatttatcgaagtaaagagcagagaccacatccgcatgcgtgtgtgggagagaggcagcggggaaacctgggcctgcggtacaggagctacagccagtgccatggcagctatcttaagaggttttacggatgatgaggtgcgtgtatctctacggggcggcgacctgctcatccactttgaccgggaaagcaggcatctgtttatgacaggacctgcaaaagaagtatttcacggaagtattgacatcccggaagaaatatattatgatttatccgaaaaataaatatgcctatattctttcagagaatatagtaaacctgtaaaatatacactctcaggccttggatctacgacgttgtgggttcaaaggtcctgggagcgtttgcgttaatggaggatgaaagtatgtttagagtgaatgaaaattatctgaaactgccgggaagctacctgttttcaaccattgcaaaaaaagtagctgcttaccagaaagagaacccggataagaaactgatccgtctgggaattggtgatgtaacccttcctatcgcaccggcgatcattgatgctatgcataaggcagttgatgaaatgggacatgctgaaacctttcacggatatgcacctgatctgggatatgcatttttaagagagaccattgcaaagaaggactttcaggaaagaggatgccagatcgaggcagatgagatcttcgtttctgacggtgcaaagagcgataccggtaacattcaggaaatcttcagcgcagacagcaagattgcagtttgcgacccggtttatcctgtttatgtggataccaatgttatggccggccgtaccggtgagtatgatacagaaaagggaacctggagcaatgtgatctacatgccgtgtactgcagagaacggttttgttccggaacttccaaaggaaacaccggatcttatttatttttgtgttccaaataacccaacaggaactacccttacaaaggatcagttaaaggtatgggttgattacgcaaatgaaaaaggcgctgtaattttatatgatgcagcgtatgaggcttatatttctgaggatgatgttcctcacagtatttatgagattccgggagcaagaacctgtgccattgagttccgttctttctcaaagaaggctggatttacaggtgtccgtttaggatataccgttatcccgaaagacttaaagagcggtgatgtaatgcttcattctttatgggcaagacgtcacggaaccaagttcaacggtgctccttacattgagcagagagcaggagaagctgtttactcagaagaaggaaataaacaggtcatggagcaggttgcttactataagagaaatgcaaaagtgatctatgacggattaaaggaagcaggttatactgtatttggtggtgtgaattccccctatgtatggatgaaggtcaatgagggaatgaccagctgggagttctttgattacctcctttctgaggcaaatgtagttggaacaccgggaagcggctttggaccaagcggagaaggatatttccgtctgactgcatttaatacctacgaaaatacagtagaagcagtagaacgtatgaaagcgttaaagaagtaatagaacaaaccgaacacaggaggaagtcttaatgctcatggatgatatcgaccgtaaaatattaaaacttttgcaggaaaatgccaggatgtctttaaagaccattgcagaaaaaacctttctgtcatctccggctgtttctgcaaggatcgaaaaactggaaaaagacggggtgatcgccgggtatcatgccatggtagaccccatgaaattagggtatcacattttggcatttatcaacctggatgtgataccggaagataaaccaaagttttacgcatttgcggagtctgtaccaaatgtactggaatgcagctgtgtaacaggagagtattccatgttaatgaaagttgcttttcacagtaccatggagttggatatttttattggacagcttcagaaatttggaaagaccagtacacagatcgtattctccacccacgtaggcccaagaggcgtggatgtggatgaagtgtaacattcataagctccctcacatatggtatagagacagacatatgtgagggagcttgttttatgaccggaaatgaaaaggtcattctggatgcgggacatggcggggatgagccaggtgccatttataatggaagaaaggaaaaagatgataccctgcgcctgactcttgcggtagggcgtattttagaggaaaatggagtaagcacattgtatacaaggactacagatgtatacgaccggcctcaggaaaaggcagagatcgccaaccggtccggagcggatctgtttgtttccattcaccgcaatgccatgccagtgccgggaacaggaagcggggcatctgtactggtatatgaggactccgggacagcagcagtcctggcagaaaacattttaaaaaatttggtggaactgggattgaaagaccaggggatcgaggaacggccgggactggtagtccttagaaagacccagatgccggcagtgttagcagaggtgggatttattgataatccttcggataatgctttttttgaccggaattttgacgccattgcaagggcgatcgcagatgggatactgactactttgcgggaacagaaagagcagacgcctctttattaccaggtccagacaggtgcatttagagatcgtggaagggccatgagactggcgggagagctgcagtcggcaggttttcctgcgtttattgtatatgatgagggattatacaaagtccgtgtgggagcatttttagatatggaaaacgggatccgcatggaacagaatgtaaaaagagcaggttatccggcatatctggtgcgggaggctgcgatctattaagaaaagagttcctgccgttggatattacacggtaggaactctgttttgttctctgtaacgggatggggagatcccataaaattttttaaaagcacggctgaagtagttgggggcggagtagcctacctgatagccgatggaaagagccgtatcatctgtatctgttaaaagcctggctgcctgttctaagcgcaggctggtaatataatggctgtagtttaaaccggtcttctgtttaaaaagtgtggaaaaataggagcagctaaaaccaagataatggcacaggtctgtaagggacagttccgggtcagaatagttttgtgcaagataggctctggctttcataaaagtttcatccatgttagaacacgctcctttttgcatgatggcctgttttcctgttgcaacagtgtagacaggtaagatacttgtattatataataaaaataagcagttttccttgagtatattgctaaaaacaggtaatatcctgcgcggaggtccttatgcagatcataaccaataaatcccagaaagagttaaaagaacatggaagttttcagttccctgttttagtcagcagggagtgtctttccggctatgaaacaggggcttttctctggcactggcatccggaggtggaactgacccttgttacagatggggtgatcgaataccatgtaaacggaaatacctatattttaaaagagggacaggcgttgtttggaaatgcaaacagccttcattctggtggaatggtggagggacaggactgccattatatttctattactttcgatccaaagctgatctatggatatgaaaacagtcttatttatgagaaatatgtgatgcctgtggtccgggacggagcgctttgtgccgttgtttttgatgggagccaggagtggcatggagagatgattgaattgatacgggggatcatttctgcctatgacggacaggaagatggatatgaaatggaactgactggaaagttgttgaaattctggcagcttcttgtgctaaatgtggaccggaaaaagggaatttccggaaaagaacagaaggattatgaacggatccgtgagatcttacgttttatcgaaaaaaattatgataagaaactgactgttgaccagatcgcggaaaatgtatatatgtgtaccagccagtgcagccgtttatttaagaaatatatgaaaaagacattgtttgactttattctggaatatcggatcgagcgcagtctggcagatctgttggatcctggctgttcgatggcagaggcagcagccggagccggttttaatgactccaattattattcaaaggtatttgtgcggatcaagggatgtgcgccatcggtgtatcggaagaagatgcggggaagatagggcataattgcgccagtgcacatcctaagccgcccagaggggcggcaaaaaggtgtgaaaggcatggtcaatacagctctgcgatccgtgtgatccccacatagatatgggagatcttataccaggtggcaaagtcggtgacacctgtctggggcagaccgaagatattctggaattcccgcactgcagccgctgtctgctgtccgtagatgccgtcaggctggatgcgggggattgctgtatatatctgggcaatggcatctaactgctcctgaagttggcggaccttatcaccggaacttcccactgtcaggtcatagcccggccaggaagcagggatcccggcaatctgttccgctgtgttgatatagatgctgtcaccgtagtaatagcgaaggatctcaatagggctgtagccctgctggcctaaggagcaggatccccattgtgtcatccaccgtggacactgaacctgccgtccgtcacagtactgggtcaatatgggctggcgtacaccgggtcttgaaaggaagctgtcaaagatctcatcgactacctgggagatgctttcaaagatattcctgccgtagatccatttatggtcaaaggcagtggaagaggtaatggtaaaatcatagccctggtttctgtaccactccgtgtatacacgatttaaggtaaaggacatgatagccagtacattggcagtaatggtactttggggccaggtggagtagatttcgctggaagccacatttttaatataatctctgtatggtacatagtaatccttggcggtggagtctgtaggcgctccgtcgtggaccacaatagtctgtgggaccaccacacggcttaatacgatctcaccgctttcgtttaccggttttacttcggcttcagcaatctttgggggataatttccaaataaagtgtggtctgggatgactactgggtcttcaggaggtgtgccgccttcatcacctgtaagtgctgcaggctggatggcctgtgttcctgcaagaatctcggtgccggagatatttaagggtttaaagccttctgcttccaccagcacatcatattcagaataaggctggtagataccaggctctaaactgtattcctcaggaggcgcaggaagagaaatgttttccgtctgtccagaagagtctgtagtcagctgttccagcacacgttccggttctcctttggagctgatggaaacttttgcgttttgtatgggaaaattattccggatgttgatcacctggatctgtaaattgcctctggatataaaatcctgtccatttgccataaaaaatgccttctttttataccgtcgttttcagtatatgagaaggcacttttattttatgacagcttttttatctgtattttttaaatctcaaatccacggactttcagataatttttaatggtttccacagcaccgtctgttccaatggctgctgtattgatcatcaggtcgtaattttccggaaattcccattcttttcctgtataatagcggaagtaatcacggcgctccctgtcgatgcgcttgatatttttctttgcatcttttgctgcgtaatattctttttcaatggtgcgtttttccctgaaatccatatccgcatagataaatacacgtaccagaccttccatgccctctaaaacgtaatctgcgcagcgacccatgataatgcagtcttcttcagctgccagtttgcggatcacctctgactggaagcggaacaggttgtccgcagatgtcaggtcagaaccaaaagagggagctcctttttcaggagtcaggctcttgatgatcttataaagcagcttatttccggctttttcgtcagccatatagtaatagctttccttgatgccgctttcatctgagttcatgcgcagaatgttcttgtcataaaaatccagtccaagttcctgggccagtttggttcctacttcgcagccgccgctgccaaattgtcttccgatggtaatgaccagtctttttccgtctttcatatgcctgcctcccattttattgtattagatgcatttagtatagcatatggaagaggcaaaaaacgtgtttttctgttaatttgacaaaaaactaatattcttaagaaaacttaggcgttattttgtatttaatacccctgcttcacatattacaaaatcaatggtccggtcgtgggcctccattgggatctcatcacacataagggcagtgcggcagaggactgcctgggtaccggtgatctgttgtaaataccggtcataatatccgccgccgtatcccaatctttcccctttcatgctgcaggaaaggcaggggatcagtgccagatggatggctttcggtgagattttttcacagccttcttttggctccaaaattccgtattttccaggttctaagtcatcaaaagaacggatcttatatacttccataatgcctttgctgatacatttcggtacacccacctgttttcctctttttagaagatcttccagtacaggcctggtattgatctcatcttctgtgcctacaaaacagaaaacagtttcagctttttggtatacatcccaggaggtgatggctttaaaaatggcagtatcactggaacggcaggtatccggatcaagagcgttccttttttcttttaatattttccggagttcttttttctgcaagtctaatggtctgttcatagttggtttcctttcagaatagaattttttaaaatgaaattcagttatacaaaataatcgccatactgttcccgtaaaaaccgggtcagttctccttccgattttccggctgcttccacaacaaagctgctggtcaggaaacggtgggtctgaggagaaaatcctttttccagcaggtggttaatgtctgtatcctttacaaaaaagttcatacggatcacaggaagtttccggttgtgaagaatgttgtagatacgggtggaaaagcagaaaatataatcgtattccagctgttccaactggtggatctcgttgatatttaaggtgctgatccactgaaaggagatatgttcccgcagctgttctaaaaagaagctgacacgttcaaagttaatgctggtcataacaatgatccgttttctgtttctggaaacggtctggtttcttaaaatatgtttctggaaaataagggtcaacgtggataaatgttcatccagaaacgtaaagccataggcagctttaaaaataatactgtaacgctttaactgctcatataaaacaggaaaatgtccttttgtatcctctacggtcttatctacaaaagtgcagtggaaatggtccagattgatctcacggtagaagtaggcatatagttcccttaaaaattcatcctggaccggaaagggagaaggaagttcgcttacgatctgttctgtgaaattttccgttgcctgccagagccttggatcaaaaggaagttttaaaggctgggcgaaatttaacatacttaaggcaacattataaagccggttctgccggggagagtctgtaaaatggatgtttaaaggagccaaaggcagtttgtaagagtaggcagatgtatcttttacagtccgtgttttcataatacagataaaaagcagcaggaattttttggagggataatttagggaccagcctgtttctgagagaaaacgggaaagaatttcggttgcttcctgaaaactgcaggagagatattccgttgccagctcataggtctgcttctccagaggcgtatttgcaaaacgggcaagtaccttattttctgatgtaaattcaaacagaggatggaggatgtcaatgaccagaaaacgcagctggagctcatcgccctgaatagaaagcccttttttcttttttgtcaccagttccaggccatagcgcgttaaaaattgccgcagcagtgctgtgtcctgttttttcgtagtaagggaaagaccccattgttcataaagcttggatgagtttacataattttgaaaaaagatggcagtgatcatcacccggatccgttcatcagaggagctgagataatccttttggtccaggttgcggataaaggaaaccaggtcttcatagctgatgcagctgtagcagatacttttttcaatccggaccataggttcactggagtaaagattgatctgttcaatggtacggcggatagaactttcatttttctgaaaatgcagggctgttttgcttaaggggatcatctgccgtttctggatgtagcgcagcagggtcaggtcattataacttaaactcatttcattcctcccagagtatattcccatgtttttgcaggtacgtaatcttaataccattataaaataaaggtaagtaaatgcaagaatatattggatattttttgccttgaagcgtctgtgtaaatctgacataatgaggatagttcacaaggcgcctgagaataaaaagtgacaagttatatcttctgtatgaaagaaaaattacagataatgcacaaaagaatgttttgtgcgtgtatggagggaaaacagaatgaataagacaaaatcaagttggaaggatgggatccagaccttcggacgttctctgctgctgcctatcgctcttcttgcacccattggtatggtcatgggtatctgcagtgcaatgacacagtcctatatgatcgcaaaatttccatttttaggaaatgaaatagtaaagctgatcttttccagtttgcagacgatcaccaatatcgtatttaacaatattccccttctgtttgctatgggtgttgcccagggaatggcaaagaaggaaaaaggaatcgctgtatttgcagcaaccgttggttatctgacgttaaatgttgtaatgagcgtatatttaaaagcaaccggtactttagctgatcctgctgttgcagcacaggtaggacagggtacagttcttggaattcagactttaaagatcgaagctatgggtggtctgatcgccggattggtagctgctaaggttgcagataagttttaccgtttggaacttccgttggcatttgcattcttcggcggaaagaaatccatcccgatcatcacatttgcctgcatgatccccatcggccttgttgtaccgatcatctggaatgcactgaccagcttcctgatcagcatttctttcatcttcacaacaccatacattggaagtgctatttattatgcattaaatcgtgcactgatcccatttggtctgcaccatgtacttgcttcactggtacgtttcacagaggcaggcggtacttatatgatcaatggacaggaatttgtaggtatcttaaatgcaaccaatgagatcctgtttaacttaggacctgacagcgaatactggagccagctgatgccaacattaaccagctaccttggcggtgcccagatgttaaccactctgttccgtgttccggccatcggacttgctatgtatcacactgcttatgctaagaacaaaaagatcgcaaagggtgttatccttacctgctgcctgactgcatttttaggaaatatcacagagcctctggaattctccttcctgtttatttcaccggcactgtttgtactttactgtgtaatgtgtggtattggcctgctgccttaccagctgttccatatctgtatcggttatatccgcggaactatttttgattttggtattttcggacttctgtacgaacatacacagtggatctacctggttctgttaggtgctgtaaactttgttgtattctattttgtattcaaatggtttattgtaaaattcggactggagactccaggaagagaggaatttgaagtagaagaatcagcaagccagctgttaaaagaaaagaactggccagccatcgcagctcttgtagtagaaggacttggcggaaaagagaacattgtaaatgttgagaactgtatttcacgtctgagagtggatctgaaggatccgaagaaggtagatcaggtcaagatcaaagactccggctgtgcaggtattttcttcccgtcagaaaagcatatccatgtagtatttggacctcatgtagagtttgtacgccatgctgtagatgacctgctgaaaaaataagaggtgaaaaatgagagctttatatgattcaaaaagcaagctggatgacagaggcatcaaatatcttttaagcgaagagaacaaatataaaacctggctgaaagtggaaggggcgcttgccctttcccaggccaaagaaggttttatcccgaaagaagcagcagaagagatcgcgtctgttccttttgggacccttgatctggaagaaatggaaaagatcaaggcaaaggtgggacatggttttgttccatttgtgaaagtgctggtaaaagcctgcaagggagagggaaagaaatacgttcattatggtgtgactacccagaatatccagcagacctcccagctttacattaccagacaggtaacagagatctataaaagttttctggctgatattttaaagaacctggcagccctggcaagggataatgcagatgcagttatgcccggaaggacccatggaaaacatgccattcctattacctatggatacaaggtgtctgtatggatcagtgaactgcttacaggcattgaaaggctggaagaagcagaaaaaaggatctttacggttatgatgggcggtgctgtaggcggctttaacgctaccggccttacaggacgtaaagtccaggatgatgtggcagaactgctttccatgagttccatggaagttccaagccgcaatatgacccagatgaaggtggaatacctgatgaacctgtgccttttatgcaataccttccataaaatggcagaggaagtgtattacactggcattgaggaattcggggaagtccatgaaggatttacacctggaaccattggaagctctaccatgcctcagaagatcaacccgaagttagccaagggcattattgccaattcccagaagctttattcccttcctgcaaccggactttattccggagtccgcatgtttgagggagacagcagttcttatatgctttttgacggactgatggaagagggaatggaactggctacggaagtgatcattcgcgcagaggaactgacccgtactttatatgttaataaagaaagacttctgaaaaatgccaatatcaacgagggactggacaacagcgaatacgtgatgatgaatgtagctgcaaagttaggaaaagacgcagcccatcagcttctttatgataaggcaatgaaaacagagctggaaggaaagaattaccttcaggtgctgtcagatgatgaagttttatcttctatgtttacaaaggaagaactggaaaaaatgatcgctccttccagttatacaggaatttgcagcgttcttgccagggaattagcagataaagcggaagccaaggcaaaaatgatgacagagaaataaagaaataagataaaggaataaagatggaatgccggatctgaccggcaggatagaaggagaaaaaatgggattatttggaaaaaagaaagtagattttgtgtccccggcaggaggcagactgatgaatattacagaagtggcagatcctgccttttcttctaaaatgctgggtgatggatttgctgtggatctgacagacggagagatcggtgcgccttttgacggggaagtaacagctgcgtttcctacgggacatgcttttggcttaaagagaaaagacggattagagtgcctgatccatgtaggaatggacacagtccagttaaatggcaaaggctttgacgttaaggtaaaacagggccagatggtaaagaagggagataccctggtagttgttgatctggatgaggtacgtgctgccggaaaatcactggtaacaccggttatcttcacagacggaacacctgtgaaaatgttaaagaaggatacacagatctcaaggggagaagaagatatattaaagttctgatcaaagagaacctataagcaggaggagaagtatgcgtaaaccacatattattactattgcgggagcaggaagcgcccgcgttcctgcattggtgggaacactggtgcagtataaagaacgttttccggtatctaaaatgatcttttatgatattgacggggaacgtatgggaaagatggaggcctatgaccgcctggtattaaaatgtttttacccggagtgtgatgttgtatttacaacggatgaggatgaagcctacagccatacagattttattttctgccagatgcgtgtaggaaaaacagaaatgcgctccctggatgagaaaattcctcttaagtacggtctgatcggacaggagacctgcggtccgggcggatttgcctatggaatgcgctctttgggagccatgaaacagatggtggaaaaagtacgttcttattccaaggatacctggatcttaaactataccaatccggcagctatcgtggctttgggactggaccagatgttcccggatgataagcggatcttaaatctctgcgatcagccattttccatgatgaaaagctttgcaaagatcctgggagtgcctcaggagatcttaagggctaaatattttggtttaaaccattttggatggtttacagacctgtatggaacagacggaaagaattattttgaccagttaaggacctatctgcgcgatcatgaatttaagccttataatgcagagcagagatccaaatcctggctggagacctatgtccgtgtaaataaatatatgcagtatctggatgagtacgttccaactacctatcttcagtattacatgttcccggatgagatcgtaaaagaaagtgatcctaactatacccgtgcagatgaagcaaaagactccagggaaaaggatgtatttgaaacctgcgcaaaggcagtaggcagagataccatggatccgtcagaaatgcttacaaacagtgtgtttggaaatctgatggtggaagtggcagagtccattgcctatgacctgaacaatgaatttgtagtcctggtgcgcaatgaagggatcatccccaactttgaaagcagggcgatcatagaagtagcgggaactattggaaaagatggtgcaaagggctatccttatggtgacatcgatccttattataagggactgatggaaggacagtatgcttatgaacagctgacagtagaagcattccgggaaaagagttatacgaaagccctgaaagccctgatcttaaatcgatctgtaatcgatccttccaaggcaggagcagttttggatgacctgatggaagccaacaaagattactggtatcttacctgatacagaatggagtgacatggttctttattcaaactatattgtactggaacacgggatctttgaagggttcctggaactggaaaatgggaagataaaagggctttatgaaaaatggcagggagaatataaagattattccgacaagatcattttccccggatttattgatatccatgttcacggctgggctaccggttctttctggtttgagaaaacatcccagtctcttcgggagatgtgccgtaccctgccttttgcaggtgttacttcttatctgggaaccacaggggcagatcccattgaggagatcaagacctgtatccgggctgctgatcaggtcagcgaagaagatcctgagggagcgcagcttttaggggttcatctggaaggaccatttatcaatcctgtatacaagggaatgcagaaagaagaatgttgtctgcttccggatgtgacagtgatggaggacctttataatacctttaaaaataaaaaactgtgccgccatatgaccatagcgccggaacggccgggagcagatgctgttcttagattttgccaggaacaccagatccagacagctgtgggacacagtgcagctacttttgaagagatcaagaaaatgcgggcctatggtcttgggggatttacccacacattcagcggaatgaagggatttcaccacagggaacttggaactgcaggagcagctttgtattttgatgatatgatctgtgagtttgcaaagcagacaggaatgacggtgtcccatgaagcttttgagctggcttacaggatcaagggaagcagccgtattgtgctgacaacagactgctgtggtcttgcccagacccaaagctgttttgatcattacgtaagaaagatccggtttgtaaaagacagggatcaggtgtgcttagagcactatgacggaaagaaagaatggatcgatccaagggattatcaggcagtaaaacaggtggagatgagttatgcccagtcggtgaaaaatatggcagatcacacaaaagtggggctttacgatatcatgttgatgaccagcttcaatccggctcattatatccatgcagatgactgcaaaggcagcatccggcctggaatggacgcagatctgactatcatggatcagaacctggatctgatctgcgtttactgtcgaggaaaggaaatacgggaatgaaatgtgcagtcagtgattttgacagaaccttatatgtggaacggatgatcggtgaagaggataagaatgcggttttaaactggcagaagtccggaaatctctttgtgatcgccacaggaaggaatttagggaccataaagcctatttttgagtcttatggcttttcgccggatttttggatcttaaataatggtgccatgatcgcagacagggatggaaagactctgtttacaaagctgatcccaagggaaacggcattagcagtattgcgctatctgcaaagtataaatgatgatggaagcggtgtatcccttacagaccggaaagtatgcctcctttctgaaaaagggaccagtacccagaaagcttgtgatggcggaacgatcacagccgatcagttggaaagtctggataatattgtacagatccacagaagaaatctggacctgaagcatataaaagatctttgtaaagacattgaagagcgtttttcggaagtttctgcctatgcaaatctgtggaatggtgatattgtagccagaggcgtagataaggcagttgctgtaaaatggctgaaagaacattttccgcagatcgaaaagatccgttgtattggagacagtgtcaatgatctgggaatggtacgggcctaccagggagcagttccggatgtagcagatcccgaaatcaaaaaagaggcaacgcagatcgtaaagagtgtagcagagtttcttgagaatttttaaataaagatcctgatcagaatttcagatcaaagtttaaactaaaaagccgtttccgggtttgaaagtaaaaccagggaaacggctttttgctatgttgtttgttatattaggaatacgtcaccgccaggtgacagctccgttggaaacagatctttatttcgctaacagattttctgcaacgacttccaggttctttctgatggcaatgtgctgcgggcatacagactcacatttaccacacttaatacactggtcagcagctttgcgtccatgaccgcctaccagccactgttcctgatgagctgccattcccttatctttgtacagggtcaggtagttcatagcagtgaaggagccggagataccgatatccattggacagacttttgcgcagtagttacaggtagtacatgggatcagagggatgcgggctaattcttcctgagcctttttaagggtatctttctgagcgtcagttaagccggtgaaactcttcatataagaaaggttgtcagccatctgttctacattgctcataccggaaaggacagtgatcacaccttccaggttggcagcaaaacgtacagcccaggatgctacggaagagtcaggttcagcagtctttaagatatctgcaacagactctggaggatttgccaacattccgccttttacaggttccatgatgatcactggttttccgtgttttcttgctacttcataacatcttctggactgaacagccggattttcccagtcagcgtagttgatctgcagctgtacaaattccatttcaggatgctctgtcaagtttccggtttctttatgatatttttaccgtccggtcactgcatccagggaattatctgtattagaagagataaaacggatgctcagtttatgaggcaggcatacgatgggttccgggccatgggagtggatcccctgtttgacgcagatctggtctctgcagtctgcttcaatcacaccgatcccttttggggagatctggatggtattctgttctccaggttctccaagggtaaaggtttccgttttctttaccgtacttaaatctacggtgcggatatcttttccctggtaagtgataacggcaactgcagcatcattcttttggttttgccgggctgtccaaaaactggcaaaagcggcacaaagcaaaaggacaatgaccagaataagagtctttttatgggatgggttcattttcattcctgtatcacctcaacatttccgccagtagtaacgctgcagtggtctgcaagaccggcggttaccataacagtaccatcatctttcatcatgatcgcatcaaaggtgtctctgtgttttttccagaaactggaagcctcttccggccccatgataaaaagagaggtggaaagggcatctgccagagttccgtcagcgctgataatggtaacggagatcagtccgttttcagcaggatatccggtccgtgggtcaatgatatggtggtaggtctgtccattttcctcaaaatagcgctgatagccgcctgaggtgatcactgcctggtcagctacttccactacagcaaaggtagagttcagatcatgtggatcctgaatgcctacgcgccacatatttccgtccggtttgtgtcctaaagcctgtacgtttccaccaagggagataatgccgctggtaacaccatttttacggaaaatatccattacacgggaagaagtaaaacctttggcaatgcctccaaggtccaggcggacatcttcgggaatggttacagcagagttttccagatctacctgtttataatccacgtgggataaaagttcttccagttcttcttcagaagggatacggaaattctgggtggtaaagccccaggcttccataaccggttcaatggtacagtcaaacaatccgtctgtcatctgggaaagttccagggaacgactaagaagagcatttacatcttctgaaacagttccttctttatctgcattgatccggtagatctctcccttttcactggaaatggataacaggctgtccagacggttgatctcagagacagaagcctctaaggcagcagaggcgttggacccataggcagtcaggttcataacggtatccatagcataaagctcgcgggaaaggctttcgtctgctgccagatctttgctttcctcctgttttgaaccggaagcttcagaaacagaagttttggagccggaagagggagcagaagcaggatggcaggccgataaagccaggcagacagttgtaagcaggatcatatttcgttttttcacaggttgcacctcatatcagtatgttaattacatctaaatcatagatttaacaaaggttagaaaatgctaatctttctgtgtcacatcttaacattgagcaaaatggttgtcaattcattactttgcagggacagatacttttggagtctttaaaaacgggaaaatctgactttttttttcaacaactttctaatgagaaaaaaataacaataaagaggggctgaaacggggacgaaagattgacttgtattaataaaaagtttatttttttgtaagaaagttagtgatagctaactaaaacaggcatgtttttatgccggggaatggaggaacctatgaaaaagaacattacgaaaaaagcagccgtatttctgctgtctaccatcgtagcagctcagtcaggactgtctgtacaggctgcagctttaacagaaggaagctgggaacagaccagttccggatggaagtttttaaatcgtgaccgtcagccatatacaggctggatccacacagcatcaggctggtattatctgaatatggaagacggaagtctggtaacaggctggaagaatatcaatggtctggattattattttactccggcaaatgaggggatcgaaggccagatgaaggtaggctggtatcagtcaccacagggagactggtatttcttcgataataccacagatactcatgaagaaggaagcgctgtcacaggatggaattggatcgacggctattgctattattttgcccgtacagaagctggaaaaggagcaaaaatggcagccaacactactacaccagacggctacaaagtaaatgcagatggtcagtgggtaaatgaagacggcgttgcacagtaccgtcagtctggcggataccgcacgaaagcaaacagtacaaccacggttacttccaagagttccggatcaggttccggctccagttcaggttccgacagtgactccggttctactacgcctgctacaccgtccactccggataccccatctactccagacaccccatcaaccccggatactccagatgtaacagaagaatatcagtatctgttgatgaacattccttatgcagacttttatgacagtgaagtaaaaggaaacgatgaggatgtagatgccgtttcttctgcaactttaaataaaacaagaacaggaagcctggttggtggttcctatcatgaagacccagaaggaagcgagattcgcggcgttacattccctgtaagagtaaagaaaggaaccgatctttcaagttttaagaaagtaacggatgaagactctgtagatattactgttacaaaccgtggacagacaaacactacaacttacaaaggaaaagatgctttatttgaaaacgaggattttgcttactatgaattaaatgaggttccttcctattacaaagaactgacagtttccggtgctgtactgacattcagcgaagtaaagggtacggctaaaaatgtaagcggtgtaagtgcaactgtatcagccagcagctcttatggcgattatcagctgtatatgaccggacttccggagtctctgtctaatgacagcacaactgtatatggcgtagtgatccatacaaaagaaggtactgattatggtatgcgtcatctggaaaatatctggcgtaagaccaatattgcctgggcaagcggttttacagagacaactcatggcaatgaactgtcaccatatcactatgagtctatgatgggacagaacattacaggtgttacatattataccagtgaaggaacaatggagatcacatttacagatgctgtgtatgtacctgtaaaatttgaacaggaaatctctgtagcagaaggcgcaaaaacagatgatattgatgtagctgtaaatggactggatgcccttcctgtggactatgacgcaagatatactgtttccggacaggacaatgatgacagtgtcatgtttacagtagtaaatggaaagatgacatggaccggcagcccggttgcaggaaagtatactttgaagattgaagatcagtccggaaaatatgcatctgtagaagtttcttttgttttaagcacaagcaatgttccggttcaggttcaggcaaatgaagatggaagctatcagctggctgcaacagaaaatgtaagtgaaaatcaggttaaagcatatgtaaaatcgattacagccgtgaaggtaggagatactacctatgcagcgaccggaagaggagctgttaagatcatcaaagatgacggtaccattgatctgtctgcaaaagcaaatggtaaatatatctttgaaagtgaaaaaaataccaacatttccattacagcaacaggttatccacaggttgacggaacggtaacagcgccgatccgttatcagtatgtactgatgaacattccatatgctgagttctatgcaaatgagtcagagaacaatactattgaggcagatgcagtatcttctgcaacaaagaaaaagcctttaaataagagtatgacagcaggaacctaccatacagaactggatggaagcgttataagcggcgttacctatcctgtaaagatcaatgagaaagcacttgagtcctttacaaaggctaacaacgaagatgacttgtatggaaatgcagatcatgcatattatgtactggaccaggagccatcttattataaagaagcaacagttgaaaatggtaatgtttcctttggaaagaatgtaaatgaaaaagaagtaaaagaatatacttctgatgcaaatgtaagcatgacactgttagaaggtaatcacaatatgcatggagattacgaaatgcgtttcagtgatctgccagatgactgcattttaagagataccaatacagttgtatatggtgctgttctccatacttctttaaatggtacaagtaaagattatggcctgcgttatcaggagaatattttccatcataagaaaaataattttgagatcgcttgggcaacaggaagcggtgatggtttccagacaactgttaaaggggcagaactttcttatgagccttatgcagatatgatgggacgcagcttaaccggtcttactgtatataccgatcagggaattattgagatcactcttcagaatgagaaatatgtaccgattaaacagaattacgatattacagtaactgctccggaagtgaatgcaacagaaaccacatatgcaggaacagagccgtttgcaaatgcacagattacagtaacggatgctgatgatcaggaagtagaaggaattacagtagatacagttaataaaaagatcagttggacagaagatctggcagcaggaacttataagctggtatttacagatccaagtggaaaatatgcgtctatctctgttccgtttaccgttaagttcagcactgtatatgtactgatgaacattccttatgcagacttttatgatagtgagataaatggaaatgatgaagatgtagatgccgtttcttctgcaactcatgctaaacctagaacgggaagcctggttggcggttcttatcatgtaaattcagatggaagtgatataagcggtattacattccctgtaaaagtatcagatgctgcagaacttgcaggtcttaagaaagtaacagatgaggactctgtaacgatcactgtaacaaatcgtggacagaccaatactacaacttatacaggaaaagatgctttatttgagaatgaaaactttgcttattatgaattaagtgaaactccttcctattataaagaactgacagtttccgatggtgaactgactttcagcgaagtaaagggtgcaaaagaagatgcggataatgtaactgcccgcttattaacagacagctcatatggtgattatcagttatctatgtcaggacttccggattctttatctgaggatagtacaaccgtatatggagtagtactgcatacagaagaaggcagtgactatggtatgcgtcatctggaaaatatctggcgcaagacaaatattgcctgggcaagtggatttacagaaaccgttcacggctgcccgttagcaccggatcattataagtccatgatgggcaagcatcttacgggtgctacttattataccaacgaaggtatgatagagatttcatttgaagaaaaggtatatgtaccggtaaaatttgaaccggttattgaagtgccggaggttaaggcaagcagcaaggaagcaaagatcaatggactggaaactcttcctgagggttatgttccggaatatgttgtaacagatgctaatggtgaagaggtctctgaatttaaggtagataatgatacgatcacctggacagacggcatagcagcaggaagctatactttaaatgtaagcgaccaaagcggtaagtatgcatcctttgagaaagattttgtattatccagttccgttgagagcgttacgatcaaaggaaataagatcgtaatagacgaagatgaattagatgcttaccgtaatgctgtttccactgttattgtggatggaaatacagtagcaggagtcaagggaacagagcttatcaatgaagatggatctatcaattttgatgtaaaggcaggtactcatggaaaaccttcagcagtatttgcagagggagcagaggacaattacaaactggagatcaaggctaatggatatccggatgtagaagcaacagatgttggcaaagattatggaccagatgtggaaattgaagccagcgcagaagtagaagactttgagtatactgcaaaagtaaaagtaactgtaaattccagaggcgaagttgtatctgtagaagataatgatacagacacagatggaaatgattcattctggaagagagcaaagaaaaaatttgatatctttaagggtgcaaccaaggatacgatcagtgatgtggatgtagatatcaagagtggtgctacatattcacttacagcagtaaagaaggcagtagcaaatgctctgggtgcagatattgatacacagctggcagcaatcaatatttccgctgctcctgcagaagttaagttctacaagaacgaagaagttgtaaagaccgtagaagtagatgcagatgagttagatgcactgggaagccttgagatcctggatgtagctctggatcctaagtacgagaaagactggaatgaatttacagtagttgttgtagatgaagaaggcaacgaactggagaacgaagcaactgttgtagatgatacatttacagtaatctttgcagacggaagagagatcgtcatcagctttaacttcgacacagaagaaaaggaagcagaagaagttcctgcagctgacaaggcagaagaagtttctgactcagaggtttctgatccgaaagatcctgaaaatgaagtaaaagaggaagaaaaggcagatgacccttcttctgatgaagaaaatgaggatgctgacgcagcagatgatcaggataccgaagagaaggaagatactgaggaagcagaagacaagtccgaggaaactgaggatcctgcagaggatgtagcagaagaggataagtctgaagaaactgaggattctacagaagatgcagcttctgatgataaggaagatgcacctgaggttccggaagtaggagagtccacagaaggcaccgctgtagaagagacagaaactctttctaaagatggcgaataatcaaactgcgataaaagaatagtaattttatacagggcttttggaaaaaaattccggaagccctgtatttgcaggaggaatcatatgaggaaaaatctgaaaaaacagacagctgtactgatcgtatccgcggcattggcagctcagacaagcctggcaggttatggcgcacccctgacaccaggagactggaaacaggaagatggagcgtggagattctgtgatcctgagcagaacgcatatgcaggctgggtccttacatcttctggatggtactatatggatccatcagacgggaaaatggtcactggctggaaacagatcaacggatcccggtattattttgagacccagcagggaaaaacagaaggaaagatgcataccggctggtatcaggatgagcagggaaaatggtatttcttcaataacaagtcaggtgaaaagacagaaggaaccatggtcaccggctggaagtggatcgatggcaaatgttattacttctcagaaaatgaagatgcaggagttctgtatgtaaacacagttacaccggatggattttctgtaaatgatcagggacagtgggtagatgaaaatggaaatgttaagacccgcagcgagtctgactttactacgatccagaaatcaaccacgacggtaaccagatcttcaggatcaggcggcggaagtagccatagtagttccagcagttcaggaaactctggcagctcagataactcaggcaatagcagtaattccggtaaggatgacactggcaaggatgacaccggcaaggatgacactggcaaagatgattctggcaaggatgattctggaaaagatgacaccggcaaggatgattctggaaaagatgataccggcaaggatgactctggaaaagatgatactggaaatggcggagactccggaaaagatgactccggtaacacagacaaaccagatgataagccagaagaaacaaagatcctgacaggagaagcagaggtagcaagcaatgaatatggaagtgtaagcggcacttatcaggttaaggttaaagtaactgtagataaagatggaaatatcatttccgtagaagatgacggaactgagccgggaaaaagaaattcatcattctgggaagatgctctggagttatttgaagaatttggcggtgaagagggagcaaagacaatagaagaagtagatcaggtcgaagctgtatcaggagcaacgatctcttccaacgctattaaggcagctgtaaagaaagcgcttcaaagtgaagatccaacagaaaagccagatgcacctgctataaaaactgcagatcagaggacccgttttgttttcagcgcagcagagccggcagacctgctgatcacagcaccggaaggcacacagatccgttatacaacagatggaagtgatccggcaggaaactcccaggcatttgttgcagaaggaaccggagcagaaacagctgtttccgtttcagcagcggaaaatgcaacgggcactatgatattaaaggcagtggcagtaaaagatggtcaggcatctgatgtgacagaaaaagaactttcctttatccagattccggaagtacaggaaaaaggtataaaagtctatgaagcaagtggaatgatcacatccaagaccaataaaccatatgaaggcaagatccgtattaccgttgtaaacggaaaaatagccaagatcgttgataacggaactgtaccggtagctcttcaggatgaagtatactggggttaccttttcccaagcagcagcagctttacaggcatttcaacgaaatttgccggcaaagacctgtctgatctgatcaatgcaaagaccaccccaggtggaggcaatgaatatgctgcagacgcagtaagccgtgcgactatttccacagatgtgatgaaatatgctgcgatccaggcacttcagggtgagccggtagagtcaagtgatgaagaagttctcgctccaaagatcaccagcagatatggattttacagcagcccaagttctacgatttatatgagcattgataaggcagagaatacaactgtccgctacacagaggatggaacagatccggatgtctccagtacaaaggcggaaaccaattctgtatcattttacagcaatactccggaattcaaagaagtacgttttgcagcctttgatgaagaaggaaaccgcagcaaggtagtgactgtatggtgctgctttatgaagaaaggaccggctgtattagagcgtggaagttattcagcagaagtggatggaattacagcatctgttgatgtaaattattccggttatatctcatcaattcagttagatgaggcatcacaggaaaaatacagtgaattccttacagagctgctggcgcatgtatattatgagcagtcagcagatattgaaatactgtcgcagtatgaggaagaaggcaagaaggaagtactttctgctgtgggggcagctattaaaaaggcaatcagcgcaactcctgtatttacagtagacccggtaaagggaacttccagtacaagatatggaacctatgaatatgaggagaagccggtggcaaccatcagctgcctggcagaaggcacagagatctattattacataacagatacttcctctactgtaaaaccggataaggatacctggacaaaatacgaaggacccgtgtctgttttatttgataacgaaaagggcggctctaaatatctctgggcagcaacgaccacagatgacggtgaaacctggctgaaaacttccaagatccagtttgtatacagcaagaaaccagtggaagatgcagttgtgatcggggatcaggcttatacaagctttgaaaaggccctggctgcagcacaggacggtgatacacttattttaaatgatgatgtagagcttacagacgaagtgacaatgccggaagcttctatttctatccagtcaggtgaaaaaggcccttatctgatcaagtcaaccaagccattaaacttaaatggtgacctgaccatatccgatgtcagctggaatgcaaccacttatgcaaacggctataatttcacagcaggagaaaatgtaacctgctcttctacaaaagacatttatgccgggtctgcatctggaacagcgcaggcaaagggagaagataacacctgctatatcactctatcatcaggcaagttctatgtatatggaacaggcgcagctggcagcacaatggaaggtgatgtagaagtccttgcagagaaagaagcacagcttcagtttgcaggaacaaagggcaagtctgaattaaatggtgattttacagttacggttgacgctacagagggaaatgcagctttaagttcttcctatggacgtacttcatcaggaactgtttcaggagagttcactctgactatcaaaggagctccgaagctttcaggaactatttatgcagttcagtataattcttctgcaagctggggtactctggacgtaacagaggcagaacttgaggagctggaactggatactcttgagaaactgaacaagaagttccagggctttgagaccgtaaacagcgaatttgatgaggaagacgaaaagacagaggaagaagttgctgcagaacttttgtcaaaagtgaaagaagatgagcaggaaaacagccaggagaaaaaggaaacagagactgtgatcccggcagaagatcctgagacagaagacaaagaagaggctgaggataagtctgaaaatgagcttgaagataagtccaatgaagatagatccgatgcagcagaagatgtaaaagaagaggaaaactctgacgaagaggataaatctgcagaagaggaggatcctgaagaaacagaagatgcagattcaaaagaggatgaggaagaagatgcaccggaagttctggacgcagatgaaaccacagaggatacttcttcagaagaggcagaaaccatttctcaggatgaagaataaaaaattatctgaaaaaacggtttaaacatggagggcggggccgattggccccgctcttttgccataaatctgcctagcaagtttgatgccaaaaaagattagtataaggcaaaaaaatttagtcttcaaatccattgaaaatttatgcaaggtatattataatgctatcaatttgggctgaggtctatagcagcgcacacatttggaagcgcaatcggatgtcaagcttgcttgtaaatctccccctacacaacataagaaaggacaggtattccccctatgaaagcataccttatattggaagacggcactgtgttcactggtaccagtattggttcccagcgtgaagtgatcagcgagatcgtttttaacacatctatgaccggttatctggaagtattaactgatccgtcatacgcaggacaggccgttgttatgacctatcctctgatcggtaattatggaatctgtcgtcaggatatggagtctttaaagccctggccagatggttatattgtaagagaattatcaaggatcccaagcaacttccgttgtgaagacacaattcagaatttcttagaagaaaatgatattcctggtatctgtggtatcgatacaagagccctcacaaagttattaagagaaaaaggtacaatgaacggtatgatcacgacaaaagagtattcagacctgtctgagcctatcagccgtatgaaagcctatacagtagccggtgttgttatggctactacaaccaaagaaaaatacgttcttccaggaaatggaaagaaagtagctttaatggatttcggcgcaaagaagaacattgcccgttccttaaatgaaagaggctgcgaagttaccgtatatccggcagatacacctgcagaagaagtgctggcagcaaatccggacggcatcatgctttccaatggccctggtgatccaaaggaaaatgttgagatcatcaaagagatcaaaaaaatgtatgactccaatgtaccgatctttgcaatctgcctgggacatcagttaatggcactggcaaacggtatggatacctacaaattaaaatacggccacagaggcggaaatcatcctgtaaaagatctggagaccggaagagtttacatttcttcccagaaccatggttacgcagtagataccaacactgtaaagcctgagatcgcagttcctgcatttgtcaatgtaaatgacggaaccaacgaaggtttaaaatacacaggaaagaacattttcacggtacagtatcacccggaagcatgccctggaccacaggactccggatacttatttgaccgtttccttaaaatgatggaggtaaatgactgatgccaaagaatcctgaaattaaaaaagtactggttttaggctccggcccgatcgtaatcggacaggcagcagaatttgactatgcaggtacacaggcctgccgttctttaaaagaagaagggatcgaagttgtccttttaaactccaacccggctaccatcatgaccgacaaggacattgcagaccgtgtatacattgagccattaaccgtagaagtagtagaacagctgatcttaaaagaaaagccggacagcattctgccaacccttggcggacaggccggattaaaccttgcaatggaactggaagacgcaggattcttagagaagcacaatgtgcgcctcatcggtaccactgctcttaccattaaaaaagcagaagaccgtgaaatgttcaaggagaccatggaaaagatcggtgagccggttgcaccttctgacattgtagaagatgtaaaacatggtctggaagtagcagcacagatcggttacccggtagttcttcgtcctgcttatacactgggcggttccggcggcggtattgcacagaatccggagcagtgtgctgagatcctggaaaatggtctccgtttatcccgtgtaggacaggttttagtagagcgctgcatcgcaggctggaaagagatcgaatacgaagtaatgcgtgacggtgcaggaaacgtgatcaccgtctgcaacatggaaaacctggacccggttggcgttcatacaggtgacagtattgttgtggctccttcccagacattaggggataaagagtaccagatgctgcgtacttctgcattaaatatcatcagcgaactgggcatcaccggcggctgcaacgtacagtatgctttaaatccagacagctttgaatactgcgtaattgaggtaaatcctcgtgtaagccgttcttccgcactggcatctaaggcaactggatatccgatcgcaaaagtagctgcaaagatcgctttaggatatactctggatgagatcaaaaatgcagtaacaaagaaaacttatgcaagttttgagccaatgcttgactactgcgtagtaaagatgccaagacttccatttgataagtttataagcgccaagagagccttaggaacccagatgaaggcaactggtgaggtcatgagtatctgcaccaactttgagggcgccctgatgaaggccatccgttccctggagcagcatgtagactgcctgatgtcctatgactttaccggactttcctatacaggactggtaaaagagctggagatcgtagacgatatgcgtatctggagaattgcagaggctctgcgccgcggcttcccatatgagctgatccatgagatcacccgtatcgatatctggtttattgacaagctggctatcctggtagaaatggagaaagaattaaaggcagtaggcgaaggaaagaaagagcttactacagagctccttgcagaagcaaaacgcattgagttccctgataatgtaatttcccgtcttaccggtattcctcaggaagagatcaagaagcagcgttatgacaatggcatccgcgctgcatacaaaatggttgatacctgtgcagctgagtttgctgcagagacaccatattattactcctgctttggaagcttcaatgaggctgaaaagacagaaggaagaaagaaagtcctggttcttggttccggtccgatccgtattggacagggaatcgagtttgacttctgttctgtacacagtacctgggccttcagcaaagaaggatatgagaccattatcatcaacaataacccggagactgtaagtacagacttcgatattgcagataagctgtatttcgagcctttaacaccagaagatgtagagagcattgtagatattgaaaagccagacggagcagtagtacagtttggtgggcagactgcgatcaagctgactgaagctctgatgaaaatgggtgtgcctatccttggtacagcagcagaagatgtagacgcagcagaggacagagagcgctttgatgagatcctggagcagtgccatatcccgagacctgcaggacacactgtatttaccgctgaagaggcaaagaaggctgcaaatgaccttggctatcctgttttagtacgtccttcctatgtactgggtggacagggcatgcagatcgctatttgtgatgaagatattgacgaatttatcggcatcatcaaccagatcgcccaggagcatccgatcctggtagataagtacattatgggtaaggagattgaggtagacgccatctgcgacggaaccgacatcctgatccctggtatcatgcagcatattgaacgtaccggtatccactccggagacagtatttccgtatatccggcacaggatattacacagcataatgttgacaccattgtggaatacacagaaaaactggctaaggcccttcatgtaaagggaatgatcaatatccagtttatcgtagacggggatgacgtatacatcatcgaggtaaacccacgttcttcccgtaccgtaccatatatcagcaaggtaaccggtatcccgatcgttccgctggcaacccagatcatttgcggccataccattaaggaactgggttacaatccaggtctgcagccggcagctgattatatcgctgttaagatgcctgtattctcctttgagaagatccgcggcgcagatatcagccttggaccggaaatgaagtctaccggtgagtgccttggtatcgctaagacctttaacgaggctctttacaaggcatttgagggcgctggcatccgtctgccgaagtacaagaagatgatcatgaccatcagaaagaatgagcaggaagaggcagtggatattgcccgcagatttgcaaatgtaggctaccagatctttgctaccaagggaactgcaagaaccttaaatgagcatggagtaaaggcctttgagatccgcaaactggagcaggagtccccgaatatccttgacctggtattaggacatcagatcgacctgatcatcgatatcccggcacagggcgcagaaagaagccatgacggctttgtgatccgccgtaatgccattgagacaggtgtaaatgtacttacagcccttgacacagcaagagctcttgtaacaagccttgagaaccgtgcaaaagagctgacactggtggatattgcaactgtgaagaatgcataaaggtgtataaatataagccccgccgaagcaacggggtttgtatgctgacgataaaaacaagtgagagaggacccgcgccaggcgcgggttcacttgtgcagacgtgcagtggaagaaaaactgccggtgacaggttctttaaacgaaagaaaagcacatggaagcaggttttaaatgcctgttttcatgtgctttttgtgcttttgctgttgttgtaatgcacgtttacaaatcctgcgtttttgcccgtggctgcctgcagcaggcggtttgtcggttaatggtttgagaaaattatgccacagaaacgtcacttgcatacttctccggatgattgaccggataagtcactttgcggccttctaacacctctgtaatgcccagagcggcctgataagacagccgttccatagcctgcttgcttaaacctgcaatatgtggcgttgcaattacctgatccatatgcagcagcgggtcgtctgcatctgggatctcaccttcaaatacgtccagtgcagcgcctgccagacggttggaaagcagcagttcccttaaagcagcctggtcgactaattcaccacgaccaaggtttaaaagatacgcatctgatttcataagttccagcttttcacggcttaccagatggaaggtatcttttgtatatggcagatgaatagaaagaaaatcggaattccggatcactttgtccagatcacttgtaagaatgccatagtccgcgcagatatctcctggaaggtttctgcggtatcctaacactttcattccaaagccataggaagcttttctggcaactgcagtgccgatccgtcccattccaagtacccctaaggtctttccttccagatcaaaggtagagatctgtgggcggatgctccagccttctttgcgtaagccgtcacggctttgtggaagcttctttgcaaggcttaagatcagtccaagggtaaattctgcaacagaaccgctgttggcgtcagctgcgtttgttacctggatgcccagccgttcggcagcttctacatcaatacagtctacaccggcaccatgcatgccgatgacctgcagcttcgggcaggaatttaaaacacgttctgtaaaatgaccatttcttgtaagaacgccgtctgcgtcatgtgcctctctcataagggtctcttcgtcatatccggtgcccatgaccacctggtatccatggtcctgaagcagagtaatgcctgcagggtctacagcttctgtgattaaaatttttttgctcatatacattacctcctaccggaaaaatcttctgaaaacaatgaccagaactggccgatcaacctcatttgccaatagtctagcgaaaagttagttctaaaacaagttgcaaactgtacaccaaatgcgtataataatggacatattgtacatcttactgttttcacatggacacatttcaacttgcaggtatccggaaaggagcacactatggcatttcttgtaaaagacctggtggaccggcagatcttcggcggagtcaggctggtagcaggcgttttaaatgtttcaaaccctattttatgggtcaatgtaatggaaatactggacactcccagatctttaaatgagggtgagttagtggtgtctaccgggtatggcttggaggaccagtctcttcataaggacctgatccaccagctgaaaaaaagaggggtcagcggtctggcgatccagccgggctattatatcgatcagatcccggaatacattatagaagacgcaaacaaggaaggactgccggtgctggaactgccggaacggctgtcattttcagagatccttcatgtgcttatggatcagatcacggaaaacaatcttatttccagaaagctggtccagggactggacacactgcgcattgcacttggaaaaaaattaaatatcagtgaaaagaaactatttgaaaaagaacagcaggtatatctttttctcatctgccttacaggaaaaaacagccgggacgaggaaagtctccggcagggaatgggaaaagtaggctcttttctttcttctatgtcaaaaacctgtattggtgagaccttgccagatggaaccggtatgtttctggcgcccttttccgatggagaagcatttacagatgccatgtatgatttcagcattttccttacctttctttcggaaaatgaagagatcaacttttatgtaggtgcccagcctttaaaagaaagcagggatctgcctgactgcgtaaaagaagcctacgatcatatctgtttgctggaccggatcggggcaaaacgggggatctgtacctttgataaccgacttttagtggaacttcttgggacgcttcatcaaaatgagtattctattgtattgggaaaccaggcattacagaaactcttggaccatgaccggtataatcacacaggctatgtacataccatccgtatctatctggcacacaactgcaatgctacgaaaacagcggaacatctgtacatccaccgccatacactgatgaagcggctgcagaatatttccgctctctgcggcattaattttacggattattacatgcgtgtatacatgtctttagccattctgatccatgattattttacttattgatccataggggctacaaaatatttcagagggtgaaacgaatttttttaccaaaactttagtaaaaaaacttgacatcacctaaaaactggtgtatcattcgacacatcaaaaataaataagcaaacggagccgaaaaggcataaatgatttcaaagaggaaattcagaacaatagtctgagtttcctcttttgttttatctgaaatcttcccggcggaccgccgggagcggtagttatcatttgttttcaaggctctgggcaaggaggaaatgattatgaaaaaaggttatgtgtatgcaatgatggctgcagttgcagcaatgacagtttccgggtgttcttcctcttcttccgcaccggcttctacagcagcggaaagcaaaactgaagcagcagcttcttcagaaagcggcactactgcagcggacacatccgatgtaaaggcagcggtggataccattaaattcggtctggtagctcctctttccggtgataacggtgcttatggtaccaagcaggaaaaaggttatgagctggcaatggaagagatcaacgcagctggcggtgtgttgggagccaagttagagctggaaacatacgatgacggcggtgatgcttctacagcagccaacggagcacagaagtttgcagatgatgactccattctggcaatcggcggttcctgccttacctcctgtacagcagccatgcttcctattacaggggatgcagagatgcctcagttggtagtaagctccagtgcaaaatctttaacaggcatcagtgattatttcttccgtatggcggttcaggatgcggcagttggtcctcagatcgcaaaccagtttacaaaaatgggcaagaccaaagcagttaccctttactgcaacaacgattacggctctggtttaaaggacagcttcaatgcacagtttgaagcaaacggcggacaggttcttgactccgtaccttatcaggcaactgaccaggatttcgcagcgatccttactactgtaaagagccttgatcctgactgtatcgctctttgcggaactacaacagacggagcactgatcatcaagcaggcaagacagatgggaattgaagcaccgatcatgggacagcctggactttacagccagaatgtcatcgacatcgcaggagatgcttctgaaggccttctttgcagcggcgtattcgtagcagcaggcgcagatgaaaagggacaggaattcgtaaccaagtacggcgaaaagtacagcggtgaagttccggacggatttgcagcattagcttatgaccagatgtatgtactggcagatgcagcagaaagagccatgaaggaaaacggcggtgaacttacaagacagactcttgcagaagcattaaaggcaactgagtatgaaggcgttaccggtaccgttacctttgatgacaacggtgactgggtaagagattacctgacactgactgtaaaagacggaaagtatgtattatatgaagagtaattcttcaggaaaatagatcaaaacagtacaggtggtgacaatatgttggtatttttgcagcaggttataaatggtctggcacagggaggtatctactccctgatcgccataggctggacaacggtatttggaattgtaggagtcattaactggacccacggtgagatctatatgctgggtgcatatacaggttattttgtaacaacttatctgggacttccgctgatccctgcgcttctcatttccatggcagccggagcactgatcgcaatggcagtagaccagtttggctataagccattaagaaagaaaggggttctggcagcaaccggatttattaccgctttaggtatttccacgatcctgcgctatactgccaacgctgtatttacagtcaaccccaaagcgtatccacagctggtagaccagaaactgatcaccatctgtactatttcaggtcagccattaaccatcagctcccttcatttatatatcctcattggaaccattatcatcatggtatgtctggagctgtttatcaagcatactcttacaggaaaggctatgttggctgcttcccaggatatgcagaccttaggccttatgggtgttaatgcagaaaagctgatcaaagttacctttgcgatcagcggtgcccttggagcagcagccggtttctttattggtaccatctacgccattaacccaaccatgggtgctttagcaggtcttaaaggctggtcctgtgccatccttggaggaatcggaagcatcacaggctccctggtaggcggtattatccttggaattgtagaaaacctgacagcaggctttatttccactggttataaggatgccattggatttgcggtaatgatcctggtacttctcattaagccttcaggacttatgggatataaatttgaagagaaagtttaaggaggcagcatatgaaaaaagaacgttttttcggaaaaaacggacagactgccttccttggagcagcagttctggtcttactgatctgttatattgacaatttccatggtggaagcgcctggatccctacttattttcagcatgtggcagttaactgtctgattgcagccatcctggcattaggattaaactttgtatccggctatttaggccagacttccttaggccatgcagcattttatggcattggcgcttatacaacagccgtattattaaaatataccaacatcagtttctggatcaccattcctgtgggatttcttctggcagctcttgtatctattccactggcaatggcttcccttcgtgtaaagggacagtttttgatcgttatcacctatgcattttgcgagatcttacgtttcatcgccattaatacagcagctttaggtggaacagccggtataccgggacttaatgctcatgtacggtaaagaagcaagcaac

SEQ ID NO: 3577 - DNA, 8095 bp, Unknown
  gut microbiota DNA sequence
gtttacacaaactttaggatactccctccacatatgtaaaataatacagaatatctgcgtttctaccatataatgtaaatccaaataatatctgtcctgccaatgcaagaagatatggtctgttctgcatgactgttttcaactgtacctttacagaaattttttctttttccggagtgatcactgcctctttcgtcttcgcaaagcagaagaaatgacaggctgtaaaaatgcatccatatatgaccgcaaccgtcagatatcctgcctttgcactgtgactgccaaatttgctgatcagtggaactgtgataatatttaacacaccaatcgctatcatcgctgcaaccgaacgagatgtatttatttttgcacgttcatcaatatcctgtgtcatagcaccacatagggttccatatggaatatttacacaggtatatcccaaaaccagcagacagtaggtaattaccatataaatgatcttgccattctgcggccagtcaggtcttgcccagaatgtcataacaagaagaaccgctgtaattggtgccgctactaacagccatggacggtaccgtccccatctcgtttttgttttatccgtaaatcccccgacgattggatcattgattgcatcccagaatcttgaaaaaagcataagtgctgacacagcagccatactgattccaaacacatctgtataaaatatcatcagaaaattactaacaaacatccagctgaaattacatccaacatcaccaaacccatatgcaatcttactgatcagcggtacttttccatttttgttttcgcttcccatatgtccctcctgtttttatcagagtttctgacagaactctattctttcctcatttgggcctttaatcataaaaaacttcacaccattttcccaaaatggcagttcttcgattccgtctgtaataaccgtgtatttttcattgcagattttctgatacatactttcaatgtcttccacatcaagtgcaacatgctggtatgcaccgtctgacattgccgcctgtctattttcaaaggtctctatacagtaattttttatctgtaaaaatgccactttttcccctgctttttcattatatgtctgcataatttcttcaaatccaagactcttataaaactcaactgttttctgtaaatcgtttgtcggaagcccgacatgggcaactccgacaattccatatttattttccatatacgctccttacttttcactgacattgataattactttcatcgttgtctcacggttatcatcaatatactggtatgccttcagataatctttaaaagcaaatgtctttgagataagcggtttcaaatgaactttgccctcatttaccagtctgattccatctatataatcatcatggcggtacatcatcgtgctcttaatgtcaagttcgtggtcatttgccactgcaagatctacttctgccattcctgcaaaaacagccaccagtacaatcgtgcttccttttcttgcatatttaattgcctgtcccattgtgatattgtttccagcacagtcgtagattacatccgccttatccggtccaaatgcttcaatcattgcctcaccaaagtctttatttttggtattcacacacacatcaatcccacattcttttgcctttgccaatctaagatcactgatatctgtgatcatcactttcgctgcccccattccttttgctgtctgtgccacgagattaccgatcggtcctgcgccaaggactgcaatattcatgccagccacatcacccatctgttttacaccatgaactgccaccgcaagaggttcgatcatagctccttcttcataggacatatcttctggaatcggtgttactttcgatgcatccactgcaaaatactcagatgctgttcctgtcgtctgaaatcccattacttttaaattctcacaaagattatactttccatgacggcatggatagcagtgtccacaatatacctgcggctctatcgtcaccttctgtccaacatgaaactctgtgacattttttccaagttctgtgatctcacctgaaacctcatgtccctgtgttaccggatattttgtaaacggatgttttccatgataaacatgaatatctgatccacagacaccaatattcataatctttaccaacacctgattttccttcacctccggaaccggaacctctctgaaaataatttctcctggatttgtcattacctgctgtaacataattgtttcctcctttttatattgttttatcttatgttttataaaacgttttattaaagtaattacattattaccctgtaaacacgatttgtcaatatgttttttcataattttatatatttcataattttaaaatacattttttgtgtatttttcacaatcaacacgcaaaaacggaaaggaaaccgtagttactgttttctttccgttttttactataatatctttttctaattttacacaacttctcgtttttcacacatataaagcggacatctgcattcgctttgcaacctgtcagtgggagtttttaactccaaccgactaaacatccccttgccctacgcactagatgcggtggactgcttatctgcgttcaaaaaatttacaattctaccatatgttttgtaaaaaagtatttcgcggctccaacagccgacgcttctttcttatacgaacaatttttcaagtatgaaacatcatgctcaaagccattatatgccatcactttttctcccagtggtatcatataatctgacaatacccctcccacatcacctcctagtatgatatccatatcatatgccatccgcagatttgatatcaaaacagcaagatgatccagatactcattccatgtctgcaaaattttttcatcaccactttcaattttttccataaatgcatccagtgactgcctgttattttgtgtcagtacacttgcagcacaatatgcatccgcacatcctgatttaccacaataacactttcttccaccgggaacgagtatcatgtgaccaaactcccctgctttctggttctgccctcgaaacagctttccatctatgcagaatgcacctcctaaggtgtggttcaaagacagatatatcgcatttggatacttttgctttttttctgcaagcattgcagcattagcatcgttttcaaaatatactggaatttccaaagcctgctctaaaaagcgcagactataattctctatacctaaagcatgggattttaaaacgatccgttctttctgatcaataattcctggaatcgccactccaatcccaagtagcgtattcttcgctaattcgccttcaagaaaagttttgaccttttgtgccacctctgtacaataggataattctgccgtaaattttaaacggatgcgatccttttttataatctcatctccaagatttactaataccatttctatatgattcgctgtaatcaaaattcccattgcatgacagtacgacttattaatccctatactttttgccttccgtccaccggtcgaagcatattccccagtttcttccaacaccattttttctaacaagtcattcacatttgctaatacagtcggcatactcaagtttaactcttttgcgatttctgccttggatgtgacatgattgttcagcacataattaattattttttttcttgttatatttcttttatctttattttccgttttcttatcctcttttattaaatattttataaaagaattatatgcttttttattcttcttgtaaagtaatgtttgctattgtcctctggcagatggcagccattgctgtcacaacacattccctgatattctttcatgacctatttttctcctcgtacatatgtgggcttcttacttcgccctgaaattgcattactttgtaatccagtgtatttttctttggcatggcacgtttggcagtcatatcatttacaataattttcatgcactgtgtcatatgtacgaatttgggattaaattttactgataccggatgataatggttcattaaaagtgtcaatgctttttccttttcttcttccagtacgatctctacacgtcccgtaccaacaacactttcatagcggaaattgcaggacatattgctctcacgataataaagctcgtgattgcaatccatttcaaacgcaatattgggattctttgcgagcagatcattcttttttccttcatagtcggtatgaatgtagaaaacaacctaatcacctataatttcttctccaaaattaaccgggacaatgtatggatatggctcatcaaacatagcaatccgaatcgtgtcacatattgaaataatatcaaactcttttacttcattcagtttatttctcatcacttgtctccttaactggttgacttatctttgctttaattatatgatatacataaataaacaataagtacatgcattaaaaatatatactatctcaaaatagagtgtaatgatgtataaaggagaattgtcaaaatggaaaatgaagaacaaaatgattttcgtctggaaggaaccggatttgcctatacactatcgctgatcaatggcaaatataaaatgccaattctgtattgcctttccaaacgtgaagtcgtccgatataacgaaatgaaaagatatcttgggaaagtaacctttaagacattaacggattcgctaaaagcattagaagaagatggattagtgaaccgtaaagagtaccctcaagtgcccccgaaagtagaatatagtcttactgaaaaaggaagatctctgatacctatgcttacggctttgtgtacatggggagaagaacataggaattaaaatttattgtagttcgcataaacatacaagcaggagcactctctataagttatcctgcttgtattttatctaataatatcctcttgtttcccgccagcctttcacataccatcttatcccgacatatattacctgtaccaataacaagaagaataggagattaaaaggcaaaactgtctttatccagtccccgaaatagattgctatcgccatgcttataaatgttaccagtatggtaattatgtcccaacagtatttcttatatagccttgcaatctttattccgatgaatgctacaagtattcccgcacccaccatacatccaccacaaaccagtattcttatcagccagtatataattccggcaatgactggattggatattccatcactaatttgtgccatgttctttcctgtcagtacaacccagccagcaatggtctgtgtgaaagtttcgattgtatcaaagaataccacgcaatcagaaataaatatttttaaccgtatcatctgaaaaagagtagttgatacggaataccatatcagcagaaacatcaatgcttcacacactctcagaagaagctcctgaggattacaatgaaatttcctttgtctgcttaagacctgatggctgtctggaattgccaagtacactcggcattgtgtgtcggtcagtttccaataggcttgatggatttgaaggatttcattttcatcagttacgacacacctacacaagcaacctgctttctaacggagctgcaccaaaggatatacaggaactgttaggacactcagatgtcagtaccacaatgaatgtctatgcccactccaccagaaaagctaagcgaaattcagcaaggcttctcgacaaggtggcaggcaatgactaaaaagaaatttcccttatttccctcacgattatctcacaagggcaaaaataatggaaaatacatatcatttcatcatacaaggctctgcaagccttgaaaaatggggaaagttcaagaaatctctccacaaattccgatttatggacaaaagtattctgaataaactcctcaaagacagaatcaaaattgctcggcatatcatctaaaaattcatttttaatcctgtctttgattttttcatataacgcaatattttctgtctgaagtcttttcccgtcttcaatatatgactgccataacaaaacctctttatcaaaatcattatttgatacaaaatggcaatgcgaacattcagcaccaaatgtcaaatagttgtaaaaaataaaacctaaaaaagattttttgtagctaccactttttttcttttcccttttagacatttccgcaatagtccagtcagaagaatcttcttttgtctttatttgaaaaaactgatactgctgattattgggagaaaattcagccatatcatcatgaaattcacaaaaaacaatacactctgcatcttcttgaagtttacctattatatggcatacaatccaatgaacttgatattcaaatctattataggagtcagaacctgcttgctcacgctgttcaacaataagtacactactcataatttaggactcctttcatttttattccatttcataataaagttccactgttcttgccattcgttctcattcacaattgcgtcaaacacaggctcaaggaaagtctggatttcttcaatgacgaatggaaactcaagtgtattatcttttatggttttcaaaaagaatttccaacgcttctgcatatcttcatcatcggcaagtgcaacaacacgcttaaaactgtctctgtcatagggagtaccgcgcctctgtaaagtttcaaatatagctgactgcaattttgcaccatcaaaatcgaatgtccttgaaagataatagatgtcataaaaatctttcattctgcctgtcagctcaaagcgttgcagtatggcatcaaacttctcggcaatagtgctttctagggaatatgttttgattacaggagcttcaaaatcaggaagctgagtgttgattgtacgttcttcagcacgaggaactataatatcacccacacctatatcaacattaaacggcacacgcacattttttatttgagcaataatctgcgtactaataccgtgatattttctttgcggagaaatttcctcaaagccttttgctcgcatttctatataatcgttacctgtcggtgtgtcgatgattttacaaatcaactcttttacatcatctattgaattagagtatccacggagcaggaaatcgacatcgattgttgctctactttcaaaattagttaaagtataaatgaacaatccacctttgagtattagcgtatcctcacacccggattttgatagttttctcaaaaattcttcctgcacaaaaagctgcaagcattgctggtagctgataccagaagcttttgctttatttctcagctttgccagaacggaagctgcaacatctgccattacaaccacactccaatcaattcttttacacgcgtttgaacacgcaaaacttttgcatattctataagattcggtatattctttttcgggtctttaacatagccctgtactgctttattaaaaacctccttatccatcttgttcatatttcgcagcacatcgcaaatagtacggtcacggtcataaatgcggactttgtggaaatcaatttcaccttcggtttcgcctagcgtaaccaactctgactctacacgatatgcctttataaacggataatcgatttttgtacgccgcttagagacatttttatctattgcaaagttccattcagcaggatttctgtcactgtatctataatagaatagggcagtctccatacaaagtactgcatcgggaaacaatcgattgataatgacaacttcgctttctccataatcttgagtccagtgatagtaacctcgcctgactctttcaatcaatccttcgtctaaaagttgttttatatctgcatagtataactttgaagctgtaagttcagcagtagtcataacataattatgactgctaaacaacattctcagtgtctcaatatctttattctgaagcatatcttcacctctatttaatcgcccttaatcagaccaacgattgggcactttactatattatatttgatttttctctttcagtcaacaatagcaaagtgaac

SEQ ID NO: 3578 - DNA, 14463 bp, Unknown
  gut microbiota DNA sequence
aataagcgtaccactgtttttatgatacgctcatcattattaaattacctcaaaatgcttcaatgcatcctttatcgcttccactttctccgctgtcggatgtttcctcggctgtttcaattcttctaccgcattaggagcatcgtacatcggcaagcctaaatctctctttacctctgcgatatatgcggtatgtactttgaaaccgtatttaacttctatgtattcctttaccattttgtaggtcactcgttctttgggcttgtaactttccgctcttttagcaatattatcaagcggaacttttccctcaccctcgccaaactcaacttttacgttgatatgtccgtctggctttttgtgggaaagcagtactaccgtctccacatgggacgaggaaacagtattgatgtcagattgcccctgttagttctcggaaacaaatcgactgactgcttctatcccagttgctatcaatagttctcggaaacaaatagcaggtttttaatcctttcaaaagacaactgcaattagtcttttttaggatacttccatattgtaattaattcatctgatagcatttctgctctggctaaaatttcatcttcgccccatttgcttacagttgtcaaataactgctaatttttattggtgtgtgtctatatcctatggcatttcctgccttgtcagtacaatcaactttatccgagaacctcttgttctgatactcagaattatacccagttaatgtaagattgccaattgtatggacataggtttcatgaattcgattcgcatctgctccaaggtcagatttccaatcatcagacagtgtttgcggcataatatgttcaattgtatactccgaagtaggaacatactcttttcttctattattctcaagtttatccagaattgttttagtcctggaagaacttaatgaataaatttttagggttttgagcgtgtccttaatttcagtatcacttggcattctctgtgcccaagtcaacgaaaagagatttgctttaaatgattttaactgattggtagcattaaggctcttcagcatagaaatacagaccggtccagcagtattagttggcaacgcacatatagctctacgcatccaatacgattccataattgtaagaatttcaacaacatcgtcatcagcgatgagaccatcatttctgtccgagagaagttttaagattgctggagtaatcttaaactgtcctgtcttccggaccttaaataaggctctttgtatacgtgtgcctttatcagaagcggtattccattctgtatagtacttagaatactgatggatttgttttacaattccttctgttccagcagctttgttctcatagtagtaatttttgaatacatcataataatctccaactaactgccgctgcaaaacagatgtcatataataattgaagaaactttcaaattgagaagactcaccagattccattccgagagctttctccataggatgccagtattccagatatagttttgtctgctttgacggatcgactgtcatcaggagaaaattgcgaattttgtcagcagtagaaagcggcaatcctgtactattcaccgtctcaaatactaactgtgcattatcttcgggaacaagacagatgtcgactaatctcagcttttttattccatcatacaccaattgaggttcaacatcactgtcacaaagagccttgtagatgattctataattctcgaaaatcttgctccttttaatatcatccggcttagttcgattttcaagaagtttcatccatgcatagaagtcttcttcatttaaccttactttgtaatatgtatccccagtctcgtcctcatttgtcagatatctgcgagacaatttttctaatgatgtggttgctttattataatcaacatcatcaactattttcgctcttgtgtagtccccaagagcaagtaacacaattgagattgtagtaagacgctgctgtccgtcaatcaccaaatattcctttactgcggaagcatgcatcgcgtcctgctttgcaagatagatgacagagccaataaaatgacaaggcctttcattatcttttgccacctttagaatgtcatctatcaattttaagcaattatccttcttccagctatattttcgctgataaataggaacatagtattgagcctctgcccctaaaaactttgtcaattctgtatctatcgctttcatagtgcgctcctttattgcccattccatcacatcatgctcttaaggattacagatgcaatgttttttccctcacgccagtcacttcccgtcttagcaatcgtggttttatatcgtccatcgccgtaataggtgagtcgataatgcttaccttcctcagtaatctcaaagcccaattctaaaagctgctgacgcattgaagccgataaggttttgtaatccttaaacaaaatcttcacggtgcgttctctttcgtctcgaatattctgataatcgttagcattaagcacatcagtcagaacatcccatcttcttgtcttctcaccaagatttttgagtttctcagcaatagcgtccagaatcatctctctgatttcgccttgataaaattcttcctcttcgcccaaatacagtatcggcatattatctgcactactcattttagaacgcaacccttggttctcgtaagtaaggatttcatttgcatgggtcaattcttcaacctgttttttcagcttttgaatgtcctcgtctacagattcaatcagttcatctgcttctgctgccatgcggtttttctcagattcagccgccagcaattctgcacctctcatactcaatcgatctctaagaagtgcattatttacgccttgccaagtatacagcttatccatcatttgagcgttgcagtactgaattacactacgaataaccttttcagacagaacagcatcaattccatcgtatgcacgatatagatacttcttatgaccatatgcactattggggaagtatacaccgatagcgccgttgaattcatttttgttatcacactgccgacggattcttccgttcagccatgtaccttcttcaacaagcacatgggcaacacctttcaaccttccagataatttccaaatatccaccggatcttcaccgtagtatgttttggagatatacacaacagggagtctataccttgaagtgccattgattacatccgtcaacaagtcgacattatcagctttaatgaaaatcggcttgcggagcattggcaaaattccatcatccttcaaataaccgtgttctatcagtagagtgataaaatgcggtgtagaaaaggttgggtcaacggccagtgcctcttccaaataactacgatcgagttgaatagacattctcatgtcattaaaattcataacgtagtcggtatcccagaccacaccatctgcttcggttttttcatagcgaaccgcgatgatgttctcatttcggtattcctcgatagcaagccacagtgtctcggtaccatatcggacatttcgttcgccattccattcgataccttgaattatattttcttcatgaggactgccctgattccactccagaaccagctggataaaggagtcctttgtcattgtatcattgatttcaagtagcgtagaaaataacagcatatgacatcttgcctccgtattttacacagaaagagacatgagattctttctcagagcctgtccctcaataggaacatagcaggaatccacaataagttctcttcccagaatatcttccagtgcaatggtctgccatgtttccagcagaaccgggttgtttttcaaaatcgtgttaatattctcaagcatcagcggactgctcagtttatcgagcatcgcacgaccatcggtaatgtttccggctgaatcaacgatatttgcatgggcaatcttccagagttttttctcactgaggagtctaaggataaaggcatccacaaactctttctgtgcctcttcgctggtcatattgacgctgtagttttcatacgcagcatcaatttcatccagggcagaagtgatcttttccagcgttgctaccgccatagaagatttctgcgcttcagtatgggtagcagcattcttctgaggcataggctttgctatcttacgttcagcgattttccgcttaccgtagttcacggccgcattccatccgcgtccaacccaatagaatgctccgtcaacagctctgtcaacaataatgggcagtgcctgtttaatgccgtccacaatcagctgctgataccacggcaaatcctcatatcgagtaggtcgtttttctacttcaacaacttctctgcggacaatgacctgcggctctggagggacaaccttggtagggtcttcatcgaccacttccagatcataagcaacagcggaataggttccgtcaccacgatgccggccacccttgccaatgcgatccccagtggtatcgtttccgtctttatcttttcgaggcaacttgcctactacatagtcgaaatctctttcttcagacatcgtcaacctccgtaacattgatttcttcgaaattgtatgctccaacagggtactcattaatataaccttctactctaaaggtctgtccgcatccgatacattcataaccttcacagtcgaaacagtgctggatttccgcacccatctgtcgttcggaggaataatctccggtgctataatcagcaaggtcaatagcattgctggcaccacaatggggacactttatgacccgcttcatgctgattccatctgtttccatttccagttcattcagctgaacggtctgaaaataagactccaacgcccttcgaaaaatctgagattttggctgtccagtcttttcactacaatatgcaagcatttggttttcctcatcattgagacgaacccgatactggttgtcacgtttatcatctacagttggtctaccttttccagccatgccttgctccttttcggatatccatttaatcttactgcccaaattatacagatttcgacattccttgtcaatgattaaaggtgtatccatttaataactttctatgaacgacaaaaacgcccagaccaaagcctgagcgtcacactgttattttcatcttattcgtttatcgtaatctcaatcccggacttgaactccactacaaaatggtcatcgtacaccgtgatcttctcaatcatccttctgaccagagcttcgctgtactcggtgacttcttctggctcactctgtaggtaagccatcatatctgctatgcgttggcggatgccttctttgtttgcttcctgcaaaagcagttcttctttttccgctcgaagttcatcgatttcatcggcaagggtctcgtagttctgctttgcgtttgccagttttaggagttcctgctgaagttccagaaggtgggcatcaatcccttccacggccgcactattgctgtctccaaggcatctctcaaaacttgcctgcagggcggggatgaaggaggaacttcccgtgatgacttcgtttaccgcccggacaaccacctcatgcagaagttcttcctttacggttcttgcagtgcaggatgggcggtctttttccacccggctgaggcatctccaaactgtggacttgcacccacggttgttccagttgattctgcggaagatgtcattacagtgggcgcaatacacgatgctcgaaagagcgtatcggctgctgtaaatcctgcgcttctgatcaggtccgcactccatgtgtgccctacggtacatttcttcacgcaccttcatgaacttctcacggggaataatggcggggtgactgttctcgacatagtactgcggaacgatgccgttgttggcaacacgctttttattgaggaaatccaccgtataggtcttctgcaggagtgcatcaccgatgtatttctcgtttgtgaggatcttcttcagtgtactttgcagccagtaatcacttccagcggcggtcttgatgccgtccgcttccaacccctgtccgatctgaaacaggcttgcaccttccagatactctcgatagattcgcaggacgatttctgcttcttccgggacgatgaccagattgccttcatcatccttggtatagccgaggaagcggttgtggttgacctggacctttccggcttggtaacggaactgcaatcctagctttacattctgggagagggactgggattcctgctgtgcaagagatgccattatggtcagaagcacttcaccctttgcgtccatcgtattgatattttctttctcgaagtacacggaaatgttcttttccttcagctgccgaatgtatttcaagcagtccagcgtgttgcgggcgaatcggctgatggacttggtaatgaccatgtcgattttggatgccatgcagtcctcaatcatgcggttgaactcttcacgcttcttggtgttggtacccgaaataccgtcatcggcatagatcccggcaagctgccactcaggatttctgtctatgaattctgtgtaatgctccacctgtgcctcataactggattcctgttcgtcacggtcagtggaaacacggcagtacgcagccacacgcagtttcggtttttcttccgtgacctgctttctgctgccgactcgttttctcgccggaattacagtgatcgttttctcagccattccgtacctcactttctatcagactgtaaatgtatgcggcctgcttgaatgggtcatcgtatctgtgtgtgacctttcctataataaaggcggtctctgcttcgcaaggcggcggtgttgtccgctcccgggttctgcctaatgctccggcacggcgattccgctcttctgcgactttggaaaaggtctcgctgtcaataatcgcaggataaaaatcatcgcccagataatgctcgttctggagtatccttttggcaccgctgtggaacagggtaagccctgcggcttctgcggcgggtaccaatgccagcccggaaaggtagccactgaacagggtacgcacctgttcagcctgcccttcgtcaatgaccgccacaccgttttcaattctgtatccatatgggatgtggtttgccatattcatcgtatcctttctttcagtatcaatccgcatttcagttcaaaggctgcggtgttcctttcgtgtatcacgacccgctccacaaactgtgaaaagcaatccccgtcaaactccgtcagcatctcaccccggctgcaaaagcggatgaggtctgccagcttttcggtctttttcatctctccgttgaccgagaataccagatggtcttgctctgctgactgcgattttccttcagcttgtgcccctcgtctgcaatgatgaggtcggcattgaatttcagcagttctgtctcaaggattctggcactctcataattcacgactacaatctccagcccgtcggtcttgccgacttcggaaagctgctgtcttttctttgcggatgcacctttcaaaatggtcagcgtatatgggaacgcagcgaatttctcaaattcctcttcccacacaccgaggattgacagcggtgcaacaacaaggatgcggttgaccctgccaaactgataaaggatgccggagatgccaatggaagtgatcgtcttgcccgtacccatttccataagcagagccacaccgttgcttctaaaatcggaagggagaaggccgaatctcatgcaggcaaaatcgaaagcctgctgctgatgcagatatggcttgaccgtaatcggcatcggaagggatttattcgtcatcgtccgcacctcctcgcatctcatgaatttcaatgtttcttacacttgtgccgggcgtaagtaccagcacctcgcagaaatcgccgaagatcagattcaaaagtctctgtggaaggcgcaccttcttgctgccaagcacctgctttttctgaccactgcggtctgcaatattgatctgtactctatgttgcagattcatcatttttcatatcctcctgttcaatgaacgggtctgcgcccggaggtcgtatctcttcctctgtaacattgggaaaaagaacaacccccggtcagaccgcagtgattacttcttacgcttgcgggacttctcaacaccgaagtgcttgcagcccttggcgatgattttattccagcggttggagatagcctgctgagtgaccgtctttccggtacgggcttcctcctcacggcggacatcttcgaggtacttccacgcccccagatggtcatagaccaggtctcgctgtgcctcggtcagcccctccatgaattccagaatggctgcaaccttctcgtccatcggtgcatcctccgggaacagcagggtaaaagggtcggatttgatatcctcgatttcgtcccacggatttaccacatcctcaccgctcttgccggaacgctcataacgagcaagtctgtcagagaacaccttgtcggtgtggcgctcatactcgtcctgctccacatcctcgtcatggtcgatgctgtctaccataatcagaatttcacggtcgatggtgcggaccgtgccgtccgggtcggtgtattcctcgccaagaccgatatgtaccgggacttcctttttgaggtcttcatcccagcgccagtaggtgtaaccgtcttcggtgaggtagttcttgcgatcctcacggaatgcgctggtacgggtcagtgctacattgttctttttggctttcattcagtgtcctttcccgctccttggcaggacggcggacaccgaaaaagccggggctacaatgtaccccggctgaaacatccccaaaacggcatgacaagacacggtggtacatcggaaatcaaactcagccttataaaaaactgctgagtatgacttcttctgcatccaccgtccctatggccatcttggaacgatatgatttaattgaagtttttcttcacccgaagaggaggatgaacaggttgattgttctaatcatttctctgttcaccctctgcggcattacttacgcttaccgctcggcttggtctgtgccagtgcacttccggctaccgacttggagtctttgccgtaacgtccgtccttcaagattctgcttgccttggaggcaacaggccttgaagtctgcttcgtgttcttcgccattcttctcaccgcctttctgttcgaaattgccttaatttccaaggctgtaatcattatcgttgattcggttttcagaaaatatggtgagagtctgggggatttctggggaaaaactggaatctgaaaaagcgcaaaaaaatacccctcggcacacgccggagggcaaaaaaagagaagaagccgaggcctcttctctgaaatttatatattattctgtatagccgatcagaagaccgtatctgccgtctccctctttgtgagtgtacatttcacgttttgcgccgtcataatctatcgtaggaatactgttttcaacgataatgacctgcccgaagtcctggttcttaacaagatactcaaacaatccgttcctcatctctgcacttgtatcgctcccgccctctttcaacgaaagaatcggtgaatccatcaacagtattccaagaccgtgtttgcctttttcggacaaatactggtgcagggcaattgccaccgttgcgttaaggaaagctttgtagccgccgccgaacttctgcttcttttttccgtttacgacgatatcgaagtcttcgctttcgaaatcaaaatagcagttgctgaatttatcaaacttgacttcggtaagtatggtgttcaggagatcattgaaatcagaaacaaactccgccgtaaaattatcctgtgccttgaatgcagcctgatcttcgtttccatcctctgttttcttcggagtggttatatgtttttcgattttctcaatgattccctgctgactcgctgaatctacagattcctgcaacatttctatctgattctgaagttcctgtattgtcggctgcaggtcctgatttatcagctgagcaagacggctgctttcttcatcacactcctgtatgcgtttcttgtgctctgcaatctcctggtcaatgtctttctcggcatccattacatcattaagctgcggaagtatcctctggagttctgcctgcgctgcctccgcatattccacactccgctgtacttccatttcagcaccacagaacggacaatgctcgggttctttttctttggaaagtttctgctcgccgtcaataataaaggtgatccgctttatatccgaatggtactggccgcggagtatctggtagcggtgcttcatcagcgaggctgacttcaggtcttcgtttatatcaacgatttcatcggacagtctgctgcgctgtgcagtggcttccgtaatacgcccctgcgcctcattgatctgttgcatcagctgagcaattcgttctttgacctgttccggggagagcgcctcctttttcacagccagtttgagttctgacaggtattccaggttctcgttcttaacaagcgcacggatttttttctcggcgttcttttgtttcttcccggttacctctttatattcctcgaattcttcctcattcagaaaatacagcagagtgcttttcatagcagtctttgagaaagggccaccgcttgtataaaatatgctctgcctcctgttcatattttccagggaaacacataaaaggttcagaaacgagcggagcgtcagagactgccttttggcattctcattcatgatgaccttcacgttatcatcaataccgaggatcttcatccatacagaattaatccagtatttcgacttgcctgctgtatactggtgtggatcgattctcggatcagtactctcaacatctatctttgtgctttcaagctggcgtgtcatcgtgacggtaccgtgtccagtttcgacctcaaggtgtacggtatcgcatcctgtgctcttgtcgattacgaacttctcgtgatccagaccgcacataaaatcaaagctgtcaagaatccagctctttccggtatcattagcaccgtgaatgatgttcagcccattgataaactctacaggcgagtcttctatccctgggccggtgaaccacagctttttgatgtaatactcattcttcatggaacgcagcctcctctttctccaacgaagctaccgccagcttgttgattttattcaaaatgccctgttcggagtcattggagaaatgctgcagcgcaagtcgtatctggcctctgtactctttggcatatctcgtatcaagctgccgggagaactccttaccccgtgcagatatgcagtaaatgaatccgttcttggtgggattgacatctacaaacccacgacgcacaagaagcgtcattccatcccgggtcagttccttcctcgttgcgaactcactgaatttaaacaagttgtccccgtggagattcatcccggaaaaagcaaagcttcttccgtacaaggcagcaaagtccacagccgcaatcatgttaattgaaaaatccgttcttgcctcagattccaggagcagcagtacccggagggctgtttcgaacggggtattaaacagttccgtcatcttcatccacccactgtatttcttttctgttcgcaagcatgtggcacatgccgactttctctgcagcacctatccatccgggaagaagtgcgatctgtgaacgggtgatcggcaccagagcggcctggctcgttactgctgtcagccgcttatacccattatcatatgaaggaatcataaccggactgatgccctccttgacctcttcacgcatttcatcgaattctttgtactctataggaagaagtgcatcctgcagtgaccgcctgattgtttcggtcgcataatagcatttccgctgatatgcaaagtccttcttataccgccgattccggtcgacatccctgcgggtatatttcggaacatcctccgcacttgcataagccgcatacaaggcctcaacatagaccatctccgtctcatccacgacaagcggcacaggcagcagatcaggctttttgtatttgctgagcatcttcttcaaaacgtcaacatcatttcggatttcgtcatcagatatgtattttcttgtggctgcggtgttcagttcaccatccggccattttatgatgatgccgggttcatcaagttctatcggagctgctgatttcggaaaaccgctgacaaacttatccgggatttcccggataccgtctgcgcattcattattgtcagtttccagaatggcaaagcgtacaagagaggtcagcagataggtaaggtcaattgaggacgcggacagcactgcacccttggtgtatccccgcagccagctcaccggtgaattggtgtcgatggttttatcttcgtcaagcaccgcgagtaccgcctggagcagaggagccctcatgctgtccttgatcaatggcattacagtcctttcaaaactgcggactgctgcctcgggatcacattcacggacaacatcggcaatatcggaaggaaccttgtcgtgaccgtttttcagatgcccaggaagagatgtgtcgcgataagccaggttcactccgaagggcgcaaaaatagcgctgcacagaggagcgcttttaatcccctggcccctcgcctgatacatcaggacaaataatgaaccgaaacaaatacacttcactcctgaaatctccttcctgttataattgcgattttatttcgtcttcgagagctggcagacgaatttcacgcttcttcttagttgaaatctcacattcccaaagaacaatagctttccatccggcttcttccagttctcttttctctttaacatctcttgctatatttttttcaaatttactcttccaaaactcactattagtatcgggtatccttgcggctttgcatcctgggtgctgatgccaaaagcaaccatgaatgaatattacggttttgtacttggaaagaacgatatctggtttaccaggatatcttgcatcattcttccgataacgaaaccctttactaaacagatactttctgactacttcttctggcttcgtattcttgctgcgaatccttgacatattgtaatgtctttgcttttctgtaagaacgtctgccattgaaagtacctcttgctaagattccttgactaacatttttatatttccacgacaaagaacagtaaacatctgcccatataatgacagcctttttgccgttgcgccggcatcaaatgcatgtgattcgataaccgcatatgttccttcttcaagtccacaggtttctgcagacaaaaacacaatcaaatctgattttgtttctatctgataaatccctttatcaacagtactaagtttcccggaacaaatcttctgtacacttgatatactcgcattaatgtccttggatactattaccgaagaaaaatttgcctttctagcggacgcctttagtttggcagcaatttccactgcatttacaggatccatctcctgcaatgtgccaaatggatgtgtactctctcccacataagcaatatgttttttattatcaatacggagccactcaatatatggcaggttcgccagtattgtttctggctggtttctgcttgttcctgaaccattaagaaccttatccacatgaacggcaggctctttctgcattgcatcccatatacgcttcagctcatccattggcctgctacgggaattgccgttctttggacgtatgattaaacgctcctgctcatcgtcaatattctcaatggtaatggcggcactacgactaatgctattcagttccagtccaatcagtttgtgaacatctcgctcaacatccgtaaaattcataccttacctccctggagcaacggaggaaaccgcagtacacttgcatcttcatctgaatcctcaatcgcagcaacatcatccagccattgtctgaggaaagattccgactccgggtcttctcctccaaccttcataaacgtcaccttattgggtatatctattctgacaggctgagtatcgtgaggtgttactgcatctttcaatgctatacctgctgcgaaccgtcgtatatcagaaacaaaatcaagtacgataaccttgtctttcccttctgatatccgtaatccccggccaagctgctgtatgaaaatcctgcgggaatgagttacacgctgaaatacgagaatgtttacatctgggacatcaatcccttcgttaaatatatcaacaacgcaaaccacattaactgtcccgtcggaaaaatcgctcagtatcctgttccttttatattgggataacggctcatactcatttcctg

SEQ ID NO: 3579 - DNA, 11152 bp, Unknown
  gut microbiota DNA sequence
acgtttacacaaaacttgaaacggtctcacataatttacagtaaggcgtacctgaccggctattggtgcataaccagcataaatatccatatcaccagttactttactgaaatctgtatcccagcccgtaaacatgtatccatcacgatccggcactgctggcgcctgtgctgcttttccatcttccacgtactgcggaccggaaataagcacatctttttcttctgcatctttataatagaaatttactgcatgacaggtgatctcttctgtatcagctgctatatacagtgagaaatgatctgtcataaatgctgttgcatcaccttctgctgctacagcttttatcatttgtgcatcatatgtttctgcatcagaagcattttcacccatgtaaaggactctggtgccggaatttccaatggcggttccttcaaaagtaacttttacacttccgtctggctgaactgcttctccatcttcattgtagagagtgatgtctgctgcaaaaagatccgttactctgcggttttcagcttttaatatatcatctgcagctgctttcataagctccagctgatcttcatcctctactgcattagcctcaatatagccattttcaggaagcacatcgcttaaagctgtcagcttcactgtcacgccttctgctcctgcaacttctgcagaaagtacaatttcagaatcaaatacacgcaatgcattcagtgtactcttataaaccttcgctgtactgcagtaaccaatacctaccagatctccgtcatctgctgtttttgccggtacttctggctgtggtgctggtaatgtttccgggatagccgctgttgtttctgctggctgtgcaggctctgtttccggttctgtactttccggggtctcttctggtacagttgtctctcccgggtctaccggaacttccggttcagtttctgccggtgtttctgtggtttcttctcctgcaggaccttccggtctgctttctttttctgcctctgctgtggtttcctctgctgtggtttcttctgctgtagtctcttctacagttgtttctgcctcagtttcaggtgcagtctctggttcagaagcttcttcctttttcagttcttcggctttttcttccttcaccggctctgtagcctctgctgcttcttccttttccggttctgttggctctgccccatctgctgcatctgctacatcttccttcatggcaactaacggtacaccatgtctggaaatagaagctgttacttcaccttcctgcgccggttcttctgccggagcctctgcctctggttcagaagcttctgtctcagattctgctgcttccgtttcagctgcttcctcagtctcaggctctgttatctcctctggagcttctgttgctgcctcagtctcttcttccttagtctcttccggctgctctttgctttcttccacatcttccttagtttccggaacttctgcggtttcttcagcagctgtggtctctttttctgcatccgttggatttacaacattttctgttgtttcttcgttcactgcttctgaaggcttttctgccggagcagtttctgcaggtttggaaataatgtttctttcttcatccccaaacttatcttcataactctttatggtaatacgtttggtggtcttttccttttcttttccgttttctgttcttgttacagttgtagaacagctgatggtatcttccccgttatttacgtaaaggaaataaacctcttcctctcctgttaccatgtacgtatcatctgcatcagccggaagctttacaaatacccttaactctgcctccatgctgtctccctggatgtccggatagacttcatatacctttccgtctccaaagaacagtgcttcaaacttttctgtggcaccgtcggtaaaatccaggctgtcctgtgataccacattttcgtcttcgatggcctgacggatggcatccaccaggtcagcaccgccaatggtaaagtccactttgtttcctgatgctgcaaagctgacatgcagatctgttcccacattggtgaagatcatggcaaatgccagcataaatgccaggaaacgcttctgtaaactaaccatttttcccgttcgtttcttgcgtctgcttcgtcctctcataccctgtttctcctctctctgaattttgtgcaggccccatttcctgccaaactccagtacttcctgaatcccgtttcacagtcattcagtttatactttcatttatctttatcatagcagagatagcgttataccaggcgttatatggacttatattttcaaaaaattttcaatttttcaaataatttacagactctatgagtttttttctcagtcgttcttgtgtttttttataacatatgctataattcgcttcaatgagtttttttctcacatcttcgcattttggaggtttgtatgctgaatcagtttgttttaagaaattacagattatttaaaaatgaaacattgctggacttttttccggctcctattaatgaacacaaagcttctctgctgacagcgcagggagacggcgaatcatttcttcctgttatctccctttacggtccaaacggctgcggaaaatcttctatattagaggcgctctggaatgtatgtcgtctggctgcaggtgatttttctcttatcacctcttccgtccgttcctactgccgtctggataatacatgcagagagcttcctttaagttttgacctgctttttcgcagaaatggttttctcttccgttatcagcttgatgtaaaacaaggcgctgtcctggaagaaaatatgttttacggcaaacccggttctgatgatgccggcgttctttttgcccgcaaagcaaatgaactccatattggaaatgaagccgggaaaatggatttttccactctcccggccggggtctctcttttacgctatcttgacccaaaatcttcctctgaatgtgcaaaagctgctgcatcctggttcagccaggttctgtttttccgggaacatgactataaaaaagccccggatctgccctctgaagtagaagaacgtcaggtcatctgccgtctgctccaggctatggatattgatattttagattactccattacaaaagaacagggcttcgatgatccatccctgatcctgacccatgggaaagcagatggaaataccttttttgtttctttcaatgaagaatccacaggcatcagaaagctgcttaccctgatcccgttagtcgtaaaaagcctgcgtctgggaagtcttctattagccgatgacttagataacgtgctccatcctcatctgctacgctttatcctgtctctgtaccaggatcatgagaaaaatcctcatcatgcgcagttagtatttaccagccataacacagcgatccttaatccggctgttatgcgaagagacgagatctgtctgtgctgccgcccggaaggaacggatgctgttctctatccactttcttcttataaaaaagaaaatggcctcatcccaagaaatgatgaagcctatggtaaacaatatctggaaggacgctatggtgccaaccccaggatctgatgactaaaattgatcttttttccattttcccattgctttaaactacgttccacacgttcacacacggccaggacatgttcctggcctgctccatttaacaggaccagatactggaccgggctgtagcaggtaaacagatctccctttcgcagactctctcctatggcattttttaacatctcagatgtcgtctgcaccatttcgccttccagcaatgctccttttccatctacaagagtaatgcagaataatgtatattcaaaggaaaaacgttctgccatgcggctcaccagacggtaactgtcaataaaggaagggtatgtactgtaataaggtccctgggtttcttccctctcttttaaggtattttcaatgtcctttagcatatcggaagtgtaacggatctgaccgctcatcaggcggaaacgctgcagcatggtttcagaaggcggaagcccctgttcttcaaaatactggacgaccacctgtttataaacttccatggcttcctgataccgttttaaagcgatcaggcagtccagcttcatcatctggcattcctcataaggatacagcctgctggctgctgtacttaagtttaaaagcctgtcatattcccggtctgcctttaaaagccggcttgccaggcgcaggcatttaaaatacagctcctggtattttacaccgatcacattgacccatttttctcctgtcatctgagaaaggaattccccgtaatacaaactgcaggcgtggcacagctcctctttttttcctgttgcaagagcactttgagctgctttttcaaaatttctggcatcaatggaaaccgtcacatttccctcatcccaccggtaaataccgccatctgtacagatatactcatgctctggcagcatttcttttaataatctgcgcagcctgaaaactgctgcccttaaactgccggatggattagcatactctccatttccgtaaaatgcatctaacagctcttccctgcccactcccttctttcctgcatacaaaaggatcagaaaaagctgcaggatcttccctgtaagagcagtccctataggaaaaaactccccttcatattccactgatatggttcccatcatccgcacagtcagtattccctttttgtccatatcattgcccatatcatttcctgcctttctgtgataaggcgccctttctagtacagttatttacgaaacgatgtactggtaattaatagctgcgcagctggtcttcttcctctttagctgtcttatcgatggaacggatctccgcctcatatccgtaggtgtcatttactttaatatacaccttatctcctgttttgcggcccttgatcgcctttcctaaaggagaatcaatacttataagtcctttcatggagtttccccggactgtggtcactaatttatagctttctgtttcatcatcttccggaatatataattccacccggtcgcccagacctacttcatctgattttgactcatctgaaacaatacgggctgtttttatcattttttccagataacggatacggctctcgttacggttcttgtcctgctttgctgccttatattcaaaattctcgcttaaatccccctgggctcttgcctcctttactgcctccaatgcttctttgcgcaccaccagcttacggtattctatttcttcctgcatttttttaatatcgtcttttgtcagattatcatacatagcttttctccttatctgcttccgtcggagtctttcataatttctttattttcccttcaggaattttattttttctttatcgtctgctcaaactttgtccacaatttacctgtatattattacttgtaaggttgatgagaccttttaccatacaggaagacactttttcatacctaagccggcagattccccccttttctgccggctccctccattttatagggcaataaatttttctcatggtcttattcatgcccttattcatgctctctcatgcggcagaacagttctgataccaccccttcatattctgcaaggtgctgtgccttgcgtatcttcttcataagcttttcttcttccggacaggaatggatcagaaatccccacagttctttcattttaaacaataccggtctgtctccgctcataacatgggtatatccgtcacagagcagacggtggaatttctccagccggtctgccttcctgtcggcagacatttttccagatactttctgggatgttccgtcagcgatctcttccattaaaaatgggttcatcatgatcccccgtcccatcattatcttatccagatccggatactcttttacaagacggtcatagtctttccttcggaaaatatccccattatagcacacagaatgtctgcttttttcaaatccctctttaaaagcattcatccgcacattgtatttataaaaatcttttaatactcttggatggatgataagttctgttaatgggcactggttgtacagacctaaaagagtctgaaactcttcttcactttccacccccacgcgggtcttgatggaaaaatgaagattttcccgttccattccctcactgacctctcccaagaacctggcaagcttttcagtatcttttaaaaatccggcgccttttcccttggctgccacagtacctgaaggacatcccaggttcagattaacctctgtataaccatattcctttaattttaccgctgtatctaaaaaatcctccggatctgatgtaaggatctggggaatgacctccattccctgattatgctctggaaggatgtcatttaattctttgctgctgaaaccgcttttatgcttcggtgccagaaatggtgtaaaatacctgtccataggcttaaaacagctgttgtatgcctgtctgtatatgtatcctgtgatcccttccatgggagccagataaaatttcatatgtcctttatcctctcatttaccctgatgtactatgttcgtgtctattatccgtgtttttgccagaaaatacaataccttatctgctgcacttcggcaacagacaaggtattaaaaaggggaggataagtattaatattttctctttggtgataatcctattataaccattccttccccgtttattctcttttcttcaaaaatccagtctgctttcgcagaattgttccatcattcattatttacagtacaaaaataagtacagttgtgatcatgatcatactgataataatagaaatagaatttactgcacttgcaagaccaatatcccctttcaggtcaccggtaaacgcaggtgctgctgctgcaatagggctgaacaccagtaccgccagtgtctgacgatattccaatggaaggggaagaacaaaataaaacatcaatgatgccaccactgccacaccataacgtatggaaaggatctttccgatctttccgatctgctttttatcgcctgaaagcttaaaaccaactccaagcattaacattgccataaacgcattggcatttccgatcagctgtgcaatactgacagcaggtgctggaagagaaacatggatcagggaaaggatgagcataccgatatatgcatcaaatggcgcagattttatcagtgttttcaaaatagggcccacagaaaacctgctgtttttatcttttgccatagaagctacactgtaagcacctcccagacagataaacgcatttcccgtatcaaataaactggtgatgactacacctgtaggaccaaaaaaaccggcggtaaatggcatggtgaaatttccaatattataaccggacatattcaggatatgaaatgccttttcatccctgtctttccctccaaggatccatccaaggctcatgtagagcacgccgcctgcaaatcctacaagacacagcaaaagcatggcaggctgtatctcagcctgtgaaaaatttgcaataatggatgcaggaagtgtgatcttaagcacgatctttgacaatacataaaaatcttcttctttaaaaaatccagctttccgcaatccatatcctaaaataataactgcaataaaagaagctgctttcatcaggatcgcttccatttttctgtcctccgtaataacccgcctgtattaatcaggctgtatttattgatcttttgacccctctgataccaaattgctacgtgctttgcacttccgcaagcaagcttgcatcggattttagaccttttgaccctggtatcatcataacacaaacctgcgctatttcaaagttattttgcatacaaggtgttcattttgtatacaacatagttactgtacatggtaggcacttttggaaccgaaagtgccgtacgataacgtagtggtagcgggaatttgccgtatttaaatgcgaagccacggcaaattccgttgctggtcatgcaacgcatgaacagtaactacaacttatatccgtcatttctacaaaactgcgatcagaacacaggtaatgcagaccatactgataatgatggaaagagaatttaccgcgcttgccaggttaatatcccctttcagatctgccgtaaatgcaggcgctgctgcggcaataggactgaacacaagcactgccagagcctgacggtattccagggaaaaaggaagcagaaagtaaaatgctgctgctgttaaaacagccactccatagcggacacctaacattttcatgatcttgctcatctgtgtccggtctcctgacaacttaaatccaacacctaacataagcatggcgagaaaagcatttgcatttgccaccagctgtgcaatatttaatacaggtgccggcagtgacagatgaagccagtataaaatatacatgaaaagataagcatcaaaaggaactgaacagagaagtgttttgcacagtgggataaatgaaaatttcttttccctgtttttaaccatagcaccaatactgtaagaaccgcctaaagcgatcacggcatttcccgtatcaaacagactggtaacaactacaccggcaggtccaaaaaagctgctggtaaatggcatggtaaagcttccgatactatagccggaaagattcaggatctgaaatcccttttcatctggatcttttccacccatgatccatccaagagccatatataaaatacccccgccaaaacctaacaggcatagtaaaaacatggatggctccatttttgtctgtgagaaattgacaatgatggatgcaggaagtgtgatcttcaccatgatctttgacataacataaaaatcttcttccttaaaaaatcctacttttttcagaacataccccaagatgatcacagccataaaagaaccagcccgcatcagtattgcttccataagtttcttcccccaaaatccctgatatcttaacactttctttatagtaacacatctcatcgttcaatagcaactgcccctaaaaaaaaataccaccccttttcaatagcctgctcatgagaaatcctacctttaccatcaagaactttacgtctgttgttgcttaaaaactgatcggtctggtctgccgattcgcaggttctgtcgccggtagcttctttcagacacatgacaacagcgaaaaacgcagaatgtgcgtttttcataaaaacttactccaacacacactctgcgtcaatctgaaagttgtataaaaatatcagaatatttatgcgaaattatattccgtcacgattttttcccgccccatggccacatcattgtagtactcatacaggcagattccaaggaatgatccggaaatattaaccacattctcatatccccgtccctgaagcgccatcagcgcattgtagcttctctggctggaacggcaatgcaggtataccggacggtctttcggaatttcatccgttctctcgcgaagctcacttaaaggaatgttcacagaacccttcaaatgtccggcctcatactctcctttttcccgtacatccacaatgaacgcctgttcctccacaaggcttcttacctgtgtaaccggaacctggcggaaacgtccgtacagaatattttcagccaccagagccgcctgatttaccacatctctggctgtgccaaatactggtgaataacacagctccaggttctttaaatcccggatggtgccattcatggaaaccatggctgcaatcacatccacccgtttgtccacatttcctcttccgatggcctgagcacccaggatccttccggttgggacctcaaacaccagtttaaagtgcataggtgcacttcccggcataattcccaccttgtcacctggaatcacataaacagaatcgcagggaattccggctttgcgggcattccgctcattaagaccggttgctgctgcatttaagccaaatacacgcagtgcacaggaaccgatgacacctctgttgtcattgggaatcccatacatcgcatccgccgccgcccgcgcctgtctcaaggccggaccggcaagagccagacgtgaaggtttcccggtcatacggtcaaagacctcaatggcatcaccaaccgcataaatatttttatcacttgtgcggtagttgtgatccaccaaaatgccgccggtctctccgatctccagtccggctgctttcgcaagccccgtctccggcgctacaccaatagccagaataaccgcatccgctggcaccgtcttgccggaagcaagggtaatctgcttctcttcaatggtttttactccatcatccacaattaaagacacgccgttgtccagcagttccttgtgaagcatctgtaccatatcgtaatcaaagggcgccagaatctggctcatggcctccaccacagtaaccttcttccccgcctttgcaaggttttcagccacctcaattccgataaagccaccgccgataaccgctgtgttctccgctcctgcggcctccagtccatcctttaagtgaacaatatctgccacattacggactgtatacacattttttccgtcaattccgccgatgcttcttggctttacaggtgacgcgccgggagccataaccaaaacatcgtaggcctcctcatgtatgtccccggtcagcgtgtttttaatctcaatggtctttttgtcacggttaatagccatcacttcgctgttaacccgtgcgtctatatcgtaagactttttgaatttttccggggacatcattaccagtgcatcactgtttcccactactcctgacagataatagggaagagcacagttggaaaaggacacatgctggccacgctcaaacataatgatttctgctcccgcgtcgagacgtcttgctctggctgctaccgaagcgccgcctgccacgcctcctatgatcagaatccttttattcatggaaaatcactcctcgtataatatcttttagatacataaatacatatattttggttaataagttactaaataaatatttgttcaataggcttagtaaagcccat

SEQ ID NO: 3580 - DNA, 242 bp, Unknown
  gut microbiota DNA sequence
tgtcgacattaagagactatgaatttgcagatgtgcaggggcagggattcataccgatttatgaatctactaaactgacggatgcattacatgaagtagccggattcgaaacggattatgaatttcttaccaaaaggaaaatgaaagaaatccaaaaacttagtaaacaatctcgagaaaaatcataaaagtctatcatccatatctgattcagaaaaaagactatatagtaaaacgaaaag

SEQ ID NO: 3581 - DNA, 1807 bp, Unknown
  gut microbiota DNA sequence
ttaaaaatgtatgctgaagaacttgatagtaaccgaaacaaacaacgttttaaagacagaactttccatattagtttactcgcagcaatcggatactcgatagtagcatatgataccgtctataatcctgaaaaagatgttgacaaacatctttttagaaacctcagtaacttgcagtattttatcggtattggtttgccttatggcagcatgaatgaatggccacagatcaaggaatttttgaagcagcgccatcatttcaaaatccgccgtggtagcaaatcctgtacttttgattttgacctggatctttcaaacgcgaatttcttatgtaacgcacaggtaatcacagcttttcttttccaaggtgcatcatcagacggtaatttaactattgataagaaggccttaccgtgtatcatgatggatgctggatataaaacagttggattatttgaactggcaaagaatctgtcgatcaatccagaaaccgcgttcagtgatacagatcatgcaatgtacaacattgataagtatgttgaagagaaggtaaaagatgctggaagagaggactttagttatcttcaggtacagtatcatgccagaggcgaaggtaatccagcagttcgtaagaacacaaccgtgatcaatgtaaaggatatctacgaaaaagttttggcagaagaagctatcaaactgtgtagcctattagaaggaaaatattcattggatgacgttgaaaatatgttcataaccggcggcaccggaatcgcatattatcctcacataaaaaaatacatggctgaacatcatggacttacaaaagtggttttaacaaatcgtgctgatgatggatccgaaatttctccaatgtacgctattgtaatcggactgcataaacagctcaaaaacaggtacaaataatggctagctacattcaaatcaacatcaatacagctaatgcgccacatttcgctacgtggtatcataaccgcagcggtcaagcaatgtcattcttgaccgctgccgtactaaattacgcaatcaagcggcaatttctcttaatcggctacgcaccgaaagacatttcccttgaagagcttccaaaagtatttcagatccgcattaaaggcaatgaatcacttgtcaaatgggaaaacgatttaaaaatggcaagcctcaataaacgccgaacgattgagtatatattggaacaatccatcagtacagatacgcccatccgttatacacaagcagaaatggatatgaaaatagccgagcttactttcggatcaacagcccgagaagagaagagtagtgtggcactttcatatgtaccggtggtaaacgaaaatcctactgataatagttccaatgaagcgataacgaaatcaacatcttccatgaaacaggatacctcaaaagttgtttctgaaaataaggataccaaaaccgcttcaagtagaactaccgaggaaaataattccgataatatattcatgaacagtgcatttgctggcctagaataaaaaggatgatgaccatgcatataacaaagaaaaaacgagatgcaattgtcaaactgcaccgtcagggcgagtcgatcgaacttctgaccgccattagcggtctcaaccgaaccaccattacatccattatcaaaaaagatgatagtgaaaagctttttcgcgaattcaatatggtaagtgaaaaattatcgtttgagcgttgataagtatttctgatcaggtaagaatttacaaagctcatctgatgtgataaaatacctattacaaaacccgctttc

SEQ ID NO: 3582 - DNA, 1637 bp, Unknown
  gut microbiota DNA sequence
aagcccgccagtcaaacacttcctctacagcagcgatagctacttcgatcatagtatcgtctggctctttggtggtcaatccctgcatccacattcccggacggcttaaaatatctaccagtttagaatcatgttttcctgcaaagcttaaaaactcataggaaacacctgcgatcacagggatcagcacaatgcggctcactatacgcagccagatggtatcggtgcggatcaccataaaaaacagaatactgatgaccataacgatcataataaagctggtaccgcagcgcttgtgctccttggagctggcccgtacattggctacattcagctctaaaccatgttcaatacagttgatgcatttgtgttcggaaccatgatacataaaggttcgtttaatatcttccatgcgggataccatttttatataaataacgaagatggcaatacggataaatccttctaaaatcgccatcacagtatgggacgggatcacctttttacatatattggaaataaacataggcagcagcatgaatataccgatcgccatgataaaggaaaagatcataacaacggtcataaggatgctttctaatttctcgccaaataccttatccagccactgttcaaagcggctttcttttgcatcttcgtcatcttcaaagaagctgcaggaccaggtaagtgccctcatgcctacgatcatggaatctgcaaatttaaacacgcctctgataaagggaatacctaaaaatggatacttttttgttacgcttctgtaagtatcttttttaacctcgatctctccatcgggtttacggacggctactgcatagttttcaccattctgcatcataataccttcgatcactgcctgtccgccaattcctgaatatttcatctatgcattacctttcgattttcatgtactttcggagtctgtatccgaaaatgcattttaacgcaaaggggctgagctgcaaaagctcaaccccttaaattctctcttataattactgagcattgatgccgtacttacgattgaacttatcaatacgtccacgagctgcagcagccttctgctggccagtgtagaatgaatggcacttggagcaaacctccacatggatgtccttcttggtagaaccagttacgaactcgttgccacagttgcaaactacctttgcctggtagtaatttggatggattccttctctcattttattcacctctctgatataatttgcggtttccgaccgcggcctgtatgccaatctgcctctgtacactgcaggcagccggtaggtaccgtcaccagaacgcacagatatcagcatcttttaagttatacgcatccttcccgcaaggttctgactcacgcgaatgctaaaactgcttgtctcagggcataaatatattgtatctctggacagctatatcagtatagcatagtttatccacattgacaagagaaaatattgaatttatacacaaaaaaacctgagcatttctgctcaggctaaatatatattttacataccttcaaaaccacatattgaactgttgatcttccgaatacttacaacctttgttttccctaaaccttattggtcaagccctcgaccgattag

SEQ ID NO: 3583 - DNA, 6164 bp, Unknown
  gut microbiota DNA sequence
agattatgagcatcgcttttgtattccccgcgtgagcggggatgaacccaggcagcttagcccatccgatcagcccgtcgtgtattccccgcatgggagggggtgaaccttacacggatacggcggatgaaggctccgataagtattccccgcatgggcgggggtgaacctgtgtttacgcacttatcaataggtttaccaaagtatccccccgcatgggcggggatgaacctttttcaccatcaaaatacaggatcagctcgccgtattccccgcatgtgcggggatgaaccccatatcatgaaggtgtacagagtccgcaagccgtattccccacataaacaaagcaacatctaattgcccagtctgtaaaatttaagcatttcttatgtgcagatgctctttgtaaaagcagcattaatctcttgacaaaccaactcaatattgttagtgtatggatggataaaatagaacgtatctatagtccttgcgtacgcagggatgctccctgattaaattccagagatatagtattccccgcatccgcggggctaaaatcaacaaaagaaagcaaagtctacaaagttgtatcgataagttgtatctctatccagccttgacgcccccagcctgctgtgataaaatcaatttagtgttttaaggagaagtggcgagaaaatctgccgtgaatgtgcgagctgccaagcctttaataaggccggcagctcttttggcattgttatgcatcctatgaaaattgccaggggatatgtatgggagaaaacggacaggagaaagtaattgaaagacaggtatatcagacattaaaaaggcgggtacggctatggctaaaaagatcaagatacggaaagtaagcgcatggactatggggataactgtagtgctggcgatcatgtttgcgatcatttcttataagagtgagaaagaattcagaacgcttcgcatgactacagaacaatatattgcctgtgaaaaggcggcaaaacagctgcaaaatggttctgcttatctgacagagcaggttcgcctgtatgcgatcacccgggaaagcaagtatatggatctgtattttgcagaaacgaatagccatcgcagggaaaatgcagtggaaagcctgaagcagtattttgatggaacagagatatttgactccttagaggaagcaatggaatattccagtgaactgatgaacacggaatattatgccatgcgtctggtgtctgaggcactttccgtaccggaagatacctggccggaagccataaaaaatgtacagttaagtgaagaagacgcccatttgggaagagacggaaaactgatccgggcaggtaacatggtctgtgatgatgattatgaaaccatgcggacacggatcaattcagatgtatcacggtgtatgaacagactgatcagccagacgaggaatcgccagggaagagcaactaccattttctctgatatgtacatgaaactggagatcggcattgttcttatgctggtgatcatggtctttatctgtctgatgttaagatttcttattgtcagaccgcttgtaagctataacgaaagcataaaaaaaggggaaatattccctgcgatcggcgctgctgaactgcagaaccttgcaaatacttataacagagtttatctggaaaatcaggagacccagaagctgatctgtcatcaggcagagcatgatgcccttacagaggcattaaacagaggttcctatgaaaaactccttcatatttatgaaacaggagatgcgctttttgccttgatccttattgatgtggatatttttaaatccgtaaatgatatatacggacatgcagtgggagatgctattttacagaaagtgaccggaagcctgaaaaaagcattccgaagcatcgactatgtctgtcgtattggcggtgatgaatttgccgtgatcatggtagatgtgaccagtgacctgaagtataccattgaagataagcttaagtatgttggggaagaactggcaaagacagagggagaagttccggctgtaaccttaagcgtaggtgtggcattctctgacagggaaaatccgggtgagagcattttcaaagacgcagataaggccctttatcatgtaaaggaaaacggacgtaacggctgtgctttttataatggtgccagctccctggaaaatgcaatggaaaatcatgaaatgaaagatcatggaatggaaaattagaacggacgatctgaaaataaatatttacaatcagatggttatgttttataataagcgccgggaatgaagttctcccaagggaaacctgaaccgcttagaaatgtaagctgatgacttctgtgatgaaacattcacggagtcaccagctttttttgttgcaatggaggctgttgatctgctgacagtatatgaattgatcaggtttggggatccgtgctattaaaggaggaaaatgaaaatgttaacatcactatcatttgtatttttactgggtcttgccatggcggcgctgtgccagaaatttaagataccccgtatcattggcatgttggtcacaggtattttactggggccctgtgtattaaactggctttcagagtcgatcctggggatctcttcggaattgcggcagatggcattgatcatcatactgttaaaagcgggattgtccctgaatttggcagatctaaagaaagtaggcagaccggctcttatgatgtcctgtgttcctgccagttttgaaattctggcctttgttatttttgccccggctatcctgcatatttcaagagtggaagcggctgtaatgggagctgttttaggcgcagtgtcaccggcagttgtgatcccgcgaatggttcagctgatggagacaaaatatggaacagaccagagaattccgcagatgatcatggccggtgcatcctgtgatgatatttttgtgatcgtcctgttttccacattcaccaatatggctcagggcggcagtgcacatgttgcagattttatcaatattccggtatccattcttttaggcatagcactgggagcagtggcaggatacgggctcagcttgttctttgaaacagcttatgcaaaagaacattatgtgcgcaacagtatgaaagtaattctgatcctgggaatgtcatttttcttaatgtctgtggaaacatggttaaagggaaaggtatctgtttccggtctgctggcagttgtaagtatggcagcagtgatccggatcaaatgtattcccaaggtatcaaaacgtctttcagagaaatttggaaaactgtggattgcagcagaggtgatcctttttgtactggtaggtgcagctgtggatatccgttataccatgcaggcagggatcgcagcagtgctgatgatctttgtgggcttaatgttccgggctgtgggagtatccctttgtatgctgggcacgaaattaaacaaaaaagagcggctgttttgtgtgatcgcctatcttccaaaagcaacggtacaggcagcgatcggatccgtacctcttgcaatgggattgccctgtggccagatcgttctgtcagtagcggttttagcaatcctgatcacagcgcctttaggagcagcaggaatggatctgacttatgataaactgctggtacgatcagaagactgaccagcaaactggttcctgtattttaagggagaaaggccataggcaccccggaactgttcaataaaatggctgatctgattgtatcctacgtcagcactgatctcagatataggttttttcgtgtttaggatcagattttttgccatataaagccggtattcgttcaggtatttaataggggacagccgggtatatttacggaacaggtcggtacagcgattcttattgatgatcccgtaggcagcgatctggcggactgtcaaaggatcctgataatggctgtggacgaaacttaacatggactggaacaattctttttcttctttatcgttctggtccggtttttcatcaaaggagcggatcagttcctcaaatacctgggatagaaaatttacaatggaaaaatatcccaaaggttcgctggcctgatctaaaagactttctaaaatgttgatctggcccggatttaaaagctggatggaactggtgaaattttcgttttccaggaaaggccggatatagtgttttaagatcatgggatggaaaatgtcaggagaaaagttgatacacagggaacaggtatctttttcggtggtgcgggaactgtgaagctgatggtcctttaccagaaggatcttatctccggacaggcggagagagtcaccattgatgcagtattccagctctccctctgaaacccagtttaattgcagctcattgtgccagtggaaaggtgtggagtcactggcagcatggtgataggtctgtgtgaaaatggcaacaggaaagtcttctgacaggtaattgactttttcctgcaggtcatcggtagtggatatgacaaattcagttccggcctgattgcattttggaaaggaaacattcataaagtatcattctccttttgtatatgtatgtttgtatatttagtatgttcagagtcttttctgatatgaattgtccaaagtatatcacttttccctgtttttcggaatggggacagtgataatctggtacaaatgtgatataatccgttctattagtgatagaaacataaggtccatgtgactatactgagggtacagaccggacagaacgctgccggataaaatgaggaggtcatattatgatatctgtaaacggagaaagattactggcaaggatcaacgaactgggagcaattggaaaggacgcagagggaagaagaacccgactggctgcttctgatacagaaaaacagggcagggacctggtttccaaatggatgaaggaagctggcttagaggtagtagtagaccggatcggaaatattttcggtatctgggagactcctgaaaataaagatcaggcgccccttatgatcggttcccatattgatacggtcatcaatgctggacagtatgacggatgtctgggtgtgatctccagtattgaagtgatcaaaactttaaaggatgcaggaatggtttctgcaaggcctattgttgcagctgcttttaccaatgaggaaggtgtccgctattcaccagatatgatgggatctttagtttatgctggcggtatggatgtagaagacgctctggatgcagtaggaacagatggaactgttttaagagatgaattaaagcgcatcggatatgaaggaaccgtagagcctggatttattaaaccatatgcatttgtggaactgcacattgaacagggaccgattcttgaccatgagggcattcgcatcggcgcagtagagaaccttcagggcatccactggcagagagttacgatcgaaggtgctgcaaaccatgcaggaaccacaccaactgcattaagacatgacgcaggactggcagcagcaaaggtaaatgtattcttaagacagttagtggagaagtcagggggcgttgctaccgtaggctgtattgaatttaagccaaatgccatcaacgttatcccttcaaaggctgtatttactgtggatttaagaaacccagacaaagaaaagctggataatgacgagaagatcctggctgcgtatttaaaggatctggcaaaagaagatgatgttaagatctccaccgagcatctgacagaatttgatccggttccatttgacgaaggcattgtagaaaaagtggaaaaggcagcaaaagcccatggtttaagtgtaagacgcatcacttccggcgcagggcaggatgcccagatgatcgcaaggatctgcccgacagctatgatctttgtaccaagcgttaagggcatcagccacaacccggaagaatataccaaagacgaagacgtactggcaggcgcaggcgtattcttagatgttgtaatggacatggcagttgtgggagtgccagcggcacgtaacaactgactttcattaagtccagcggtgtgatgtcaagaaaataaatgatttaaaaatcatacatttttgatatataccgcaaagacaaaaaacacccacctaagccctgt

SEQ ID NO: 3584 - DNA, 5587 bp, Unknown
  gut microbiota DNA sequence
acagaggttatttattttcttctgcagatcagtttgaaccgttgcaatcatactaaccagatagttttctgaaattggaaggcgctgcattcttccactgccaacacgataggtacagctcagcgaagattctggattttttgtactgttatccaatattttaagctgctgaagcaagtcagccacttccaaaagagcctgttcctgcgccgtgtccttcattatttttgccataagttttcctgcctaagtctgctgccaggcagtccactccctcccttcttatgcttccaggaaataaaaacctgtcgccccaacgatctgccaccgggccttctctgaattgaataccggctctacaaaacatcctggtaagacatctgcttttgaaagtgcgcttcgtgatatcaataccgtccctgtcgtaaaaacacaatgcttcatcagcggctcatcaatgctctggatcatggaaattactttttgtatgcctttagcgtcttcgcatatgatggccgcaaacgcagatccatttcctatagtctcatggattactgtacgcagagctgcacaaaatcccttaacctttgaatttatataatacgaatgatctttttcggttacaatcctctcattcgtatagaaattaaccgcgaagatcaccaggcgagtgggcataactccttctttcttaaaatcaataattgctggcaactcatctatacccttcacatttttcaggcgataagaaaatatatattttgacatatacttctgcttcaaaaaaaccgccgcaagtaaccccgcattagcccgctccatttttgtcatctcattaagccatattgtttttgaatcaaaccttaattgctgatctgcctccagcatggtccgaaaagcgtatgttgcatgggcagtaagagaatacatctgccgggtctggtgtgcttctgattttgcactcttcaaatatgcgtatacgctttcattgatctgaaacttttcaacaataaccaaaccactcattgccaacgtatcaaggcgctctttcagggaacgacgatccaacttcggaatacaacgcgccggccgtttttcttccttagctttttgttcttccttttcccgttctgccatcagcaccgtacagattgataacagatccgcatgtccaagcattcggatcacacgtaaaatatacatatcagaaactgtaaatgctttctttactaatagcgcctgcatctccgctaatgactgcggatttgtaacacctgcaacctcaaatttcattctgctgggatcccatatagaatacggagatggaatgatcaattccggcttcaaatcctccaaaatctgctttgccagcacctgtgtatcatattctaatgccacgtttccccctactttctacataattcgatttatgaaaccatgtaggtccaaaaatagcaacaattttagtaatttaatcaacaatatttaaaatttaataaaattattaatagtatcacagtcaaaaacttgaatccacgttgtttttaagaaaaaataattgtaaaataatgtcataaatcgaattatgtcattattttgatattccattataaaataccatattaggtttgggcattttccccaaaaaacgaccattataaaagcaaaacaaaagcaaaacttccattcatttattttctgaacaagaagttttgcttttgttttctttgacatcaaacgcacgttcgctatataatcgaactatccaataaaacggaaagcgtatgaatggagtaatatgatgaatacagtcggttccactactgttgatataaaaaaaaccttattgcactatataaaagcagaatttaaagaaaaagatctcgatatgctgaagtccttacttggcagcatttatacagaattaacgaatacaccagatattctgccccacttagaaagcccgaattttgcagctgatcctctggattgctgtgacagaacaaattctgataccattactgacacgccctctttctctccagataatttgaaaccttatcaggattttttaatagcaaatgagcggtccaagaatacaattagcaaatacatttctgatgtaactggcttcataacttttttatccggtgcagaaatttcgaaagaacaatgcctagattataaaaaatatctattaaaacaaaactatgccgtttccacggtaaattcaaaattgtgttccattcattcttttttgacctttttggatcgcgctgattgttttgttcaattagaaaaagttcaaaagaaagaattaaaagctacctatgctattcttaccccggaagattaccataaactcctggaagaaagcagtcgccctcaaaaaagaaaggttaaccttatgatccgcgccttcggacaaactggtatccgtgtttcagaattgcagtttattaccgttgaatccatacagcaacaggaaatcacaattagaaataagaataaaaacagaaaagttcctttaatccgggaacttcagaaaatgcttaatgattatgtcattgaaaaaaacatcccatctggccctattttcactgataaaaataaaaaaccattggaacggcaaaatatttataatatgctccagaccattgctgccaatgctggcattgataaaaggaaggcacatccccatgcacttcgccactttttcgccaaatccttttatgacaagacgcatgatttggtcatgctctcaaatattttaggacattccgatatcagcaccacaaaaaactatgttaccggtacgttcgaagaattatgcaacgaaatggaagaaataggtatcttataatttccaaatccgccatttgcattaagggcagctccgagatatagctgctctccgcataatctatccccaatatttcatatttttctgcaccatataattcactattcaattttgggaaaaatgataccctactacatagatcaggtatcattttcctcagtgacatgctcccaccacttagctaacgcttgaagtgggggcttctcgttcgattgcccgatagggcaaagcataagcgagctatccccgtgtgtcccacggttttatcagaatgatattgttggaatttttgctgcaaagatcagaaaattttcttttctatatcaagcatcattccggatattcgaatcccttctctgcatatattgattgctgcgttttcgtcccgatccattcgatttccgcatacacactcataaatgcgatcgctcagctgcaaatcttcttttacctttccacagcagctgcatgttttggaactgggataccagcgatcaatgcggatcagtttcttacctgcacgttccattttatatgtcagaaaatcagtaaacattccccagctattgtcatgaacactctttcccaaatgcatatcctggctcatctctttcatattcagattttcgatgcacacgatatcgtaggaattggctatcttctttgattctttatgcaaaaaatcctttcgctggtgtgcgatacgggtatgaattcgtgccactttcttcttttgttttttataacggttgctcccctgttcacagcggctcagtctacgctgctcccttgccagcttctgccgggctttttgaaaaaaatgaggatatgctgcatgatttccattgaaatctacatacaactccttcatggaaaaatcaagaccaattgcggtttctgctttcctggtttcatgcaccggttcctcgcaggaatataacagagcaacgtaatatcgttcatctgcttcctgactaattgttgcacctttcagctggtaacattcatcaatcttccgatgttgtctgattcggacccagccagcttttggaagtttcagttttccattttgtaagacgatgtttccattcacataattggttgtataacttttcacagatttcttttttgatttgaatttcggaaacccaactgaggcatcacgaaagaaatttttgtatgcagtctgcaaatgcagctgcgcattacacagtgccagactgtctacttcctttaaccatggaaactccgatttatacctggctggtgtcaagcttaagttcttcccggttttctcataatgcgcttttttctcagcaagcatccggttataaacaagacgaacgcagccaaacatttttgcaaataattccctttgtgctttattcggataaatccgaaaacggtacacggtgttcacttttaccctctccctgtgtttcaatgtactgacggatgacctcaattggggcaccgccagcactcagcagacaaaaactctggctccagaatgtttctttccagagcttttgccggacttccggatactcctttttaatcaggcggctgcttgcgcttttatatgcattgatgaacttactcagttctgatttgggatgagcacggaacatgatatgcacatggtcctgatcatgattccattcttccagagtaatgtgatagttcggagcaatatgctcaaatatttctctcgcccgatttgaaatcggatcattcaaaaccttttttcggtattttataaccagaatcaaatggtaatataataaaaataccgagtgtgcattgctatccaattttctcataataatcagccttccctattatctcgactgattatattgtaccatatatttttctatatgtccatgttttatcgaacgcaagttctctttatccgcgcagctatgtgcaatatagaatcatgccagttattgcaatatcagaaatcaaaagcaggcaattcatcccaccccctaaagaggatgggggaattcttgcagtgtttagtcaaaagtccagtaatccgcttgattttattgcacattttgaatgaccaaaccccaaatttttcacccatcttggatagcagaaaaatttggggttgtttccgatataaatgaggtatcattttcacactgtaagtaaggtatcattttgcctaaatctgttctcctttcaccgtctgatatggagcagtcaattcatctaatatttctttttcccgcttaattctattcctaatatacagtgtagctcttgcgtcttccaaggaatcatgcgctttatagttatacccaaaatgtgcggcggccgcttctaacgtctgccatcgtcgggttccgtagcgcttatcataattcccacaaatttcggcaaaatcatacatcacatcttctaattcggtattcgtacctggttcaatacctacaaaaaataaaaatccgagatcgaaatcacaattatacgcgatccatgttttccctgatgcaaaaacgccctttatcttccctatcagttctctgatggtcttacattttcttaccctctctggtgtaataccattcacccgttccgcgtctggccatgacctgatcagctctggtcggacatactcattaagaagtaaatccccgtttccatcaaccgcactgatctgtaaaatttcattatcgttactgttcaaccccgtagtctccagatcaa

SEQ ID NO: 3585 - DNA, 2450 bp, Unknown
  gut microbiota DNA sequence
taacgtttacacaaaacttgaaacggtctctatgtggaaggaaatgccacttactatacgacttattccatgtgcattattattccgtctattatcggggcagcttgttttcaaccagtattccgcaagttgaataacaaaggaagaacagcatctctctttgctttatttacaggaatttcaatgttgtctatgtttttcttcaatgccaaagaatcaccagctattttttatgcattatctggtctcacacagttttttttctctggatttaataccgcaatctatgcaattattccagactgtgtggaatatggggagtggaaaaccggacttagaaatgatggttttcagtatgcatttatttcacttggaaataaaatcggaatggcagttggaacagcacttttagcaggattacttggaaaatatggttatattgcaaatcagacacaaaatgcaactgtactttcaattatgaaacatgcatttacgacgattccaggtgcactttggattgtgactgcggttgtattatttttctaccggttaaataaaaaacgttataacgagattgtggaggaactgaaaaatggaagaaaaagttgatatcgtggcattgggagaattgctgattgattttacggaagcaggacacagtcaggatgggaggaaattgttcgaacagaatcccggcggtgctccggcaaatcttctaaccgttgcaagccactttgggtatcacacatcttttattggaaaagttggaaacgatatgcatggtaaatttttaaagaagacattgcaaaaggaaggaatcaatacagatgctattgttgaagacccgggttattttacaacgttggcatttgtggaaatcggtgaaaatggagaacgaaatttttcttttgcaagaaaaccgggtgcagatacacagttaaaaaaagaagaactggaccagacgttaatttccggatgtagaatttttcattttggatcattatcgctgacagacgaaccggcagaaagcgcaacgatcgaagcggtaaaaatggcaaaagcagcgggtgtacttatttcctacgacccgaattaccgtccatccctgtggaaaagtaaagagcgtgcagtgaaaaaaatgaaatctgttgtagaactggtagatgtcatgaaggtatcggatgaagagagtattctcctgacaggggcaaaaagttatgagcaggctgcagaagaaattcttgctatgggaccgaagctggttgccgttacattgggagaacagggtgttcttatggcagcaaaaaacagaaaagaaatcataaaagcgtttcagaccaatgcagtcgatacgaccggagcgggtgattccttctggggaggcgtattatgcagtattctttctataaacaagcccgtagaaaagatggaatgggaagagatcagaaagtgtgctgttttgggaaatgcagttgccggattgtgtgtgcaaaagagaggtggaatccctgcgattccgacgaaagaagcagtgcttgaatttatgatgtggtataaaaaaagttgacacctcattctcaaggatttgagatataatcaagaggataaggagagtggacaaaatggtaggaaacagacaatatgaccatgaatacaaagtacaggcggtgaaactcgctaaagaaatcggacaagctaaggcagctgaagaactgggagtgccaaggaataccctgtatggccgggtacatgcgaaccgtcttggcaatcttgatcttggagctggctcacagactccacaaagtgccatgacgcttaatgaagaacttttaaggctccgtcaacaggtaaaggaactggagaaggaaatcagacttttaaagaaagaaaacgactttcttgaggaagccagtgcttttttcgccgcgagccgtctgaagtcagcaaaaacgaaagaatgaagtttattgcattaaaaacaaaagacggcagctccaaaggaaatattacctttttctgcagggttctccatgtcagcagacagggatattaccagtatcttgtcatgaaagaccgcccatggaaatatcagccactggcagatgccatgaaagatatacttacagaagatagctgcaatgatacgtatggccgtacccgtatgtatcaggcattgacgatgaaacagccgaaaaatgtggatattcccagtgaacgcactgtttaccgtgttatggaagagattgggatcagtcatcatcccagacgcaaaccgaacgggatcacaaaagcggacagggaagccagaaaatcagaggatctgttaaagcgtgatttccacgcagaagaaccgctgacaaaatgtgttacagatatgacagagatcaaaggctgtgatgggaaactgtatgtttcagccatttttgactgctttgattccagcgtgatcg

SEQ ID NO: 3586 - DNA, 27969 bp, Unknown
  gut microbiota DNA sequence
ccattatccattcagacaggggaatgcagtataccagccagctttaccgggaagcgatacagaaatatggcatacaacaaagtatgaacagcgcaggtggcaggtgccacgataatgcccggtgtgagagcatgtgggcaagaatgaaaacagaactgctatatgatcgttatgatacagagaaaatgactacggatgaacttaagacaatcatctggagatatttcaccagttactggaataacaggaggatctgctccactaatagaggtcttcccccaatgatcaaaagacaacaatattacgcttccctgaaggaagcagcatagggttcaaaatccttgaggaaaatgtgtcaactaatattgacaatatcagatctggaaaaggcgacgttttattcaataacataagaaaatccgaaaggacactaattttcagaatttctggaagataagtgtccttttctggatcttatacctcaaaaagcactgaaccactggataatggcaggagttttttgcaatcttaaagaattttaagcagtaaagaagagatattgttcttgtgtacggaggggcgtgggcgtataataaaatcagttttctgaattttgagacaacttcaatggtcatcagaagagaaccagaaattattacaactactacagaggctgtttttcaggaaaattgtaccgacaggatatggaaatgaggtttttaaggtgaaaaaagggaaaaaagttacggctgaattgatatttcttatattaatgacagtattaatgacagctctcacaggatgcaataagacagataaaataacggacacaacgaaaaatcctgctataaaaatcggaagtgataattatcctccctataattttctaaatgaggatggtatgccgacgggaatagatgttgatctggcgacggaagcatttggaagaatgggatataagatagagatcattcccataagctgggaacagaaaaagaaaatgttagaaaatggagaaatagactgtattatgggctgtttttccatgaaaggacgactggatgattatcagtgggcaggtccgtatatgataagcagacaggttgttgcagtcaatcctaacagtgatatctataaattaagtgatctggagggaaaaaaacttgctgtccagtcaacaacaaaaccggaagagatatttctgcgccggacggatgaaaggattcctaagctggggaatctgatcagtctggaaaacagggaattgatctatacttttttaggaaaaggctatgttgatgctgtgggagcccatgaggaatccattatccaatatatgaaggattataatatggaactgcgtatcctggatgaaccacttatgacagtggggctcggagttgcatttgcaaaggatgacaccagaggtatttgccagaaattagaacagacattagctgacatgaaagaagatggaacagctgcaaaaatcattgggaagtatcttgatgatccggagaaatatctggaggtagataaaattggagaagaataaacaggaatggataaaaatgaaattctggactgtcagtgcagtcctgggtatgtgtctgacctgttttacagttctgtattttttctattttagtaaagcctatgaggaatcccggcttttgaatatagtaaattatgtgaaggtacaatgttctgtgtatacacgttataatgaggtgtcagaatgtaaatgcctgatacgtgcgatcgacagtgcaagacaggtcagtgttgtcatagatgcaaaaacacaggacggaaaagaatttaacaatcagctcttagaagaatgtacagaccaattatggctgacaggtgctatggtactggatgcaaatggaaatattgtaggtgaatatagtgagagcgggagtgtggatagaagccgttttgcaaaaatacaggaacatgttaataaagaaacaatactggatattgcagatcatgaggaaaaggtatattcccagcagatcagctgtgatgatggagggcatatagatgtagctgcatgtgccaggagagatgaacctggtattgtaattacttattattatacatctgctgagtttttgcaaaattataagcttaccatacagagcctgttaaatggatatcagacctttagtgacggaacgatcatgatcgtggataatggtgtggtcattgcttccaatgataccagccttattggtcaggatgcgaaaaaacaggaggtgatccaggctttaaagaaaaatgcagacagcagacatttaatgcatttgaatgtgggtgacgatttctattatggactgatgctgaaacaaagggattattatatttatgcatatattccggagcgtactgtgtttcatacgttgccgcaaaatgtgataatggtcatgtttatttatatggtggtggtgacactggtatggctgcttcttaaaaaatccagggcaaacagcattaaaatagaaatggaaagagaacaggagtaccagagaaaacttctggaagaagctaaaaaggcagaggcggccaatcgggcgaagacagaatttctccagaggatgagtcatgatatccgtacaccgatcaatgggatttgcggaatggtcgatgtaggggatcattacagcaatgatctgcagaaacaggcagattgcaggaaaaagatccgtgaagcttcaaatattcttttagagctgatcaatgaagttcttgatatgagcaagctggaatcaggagaaattttgctggaagaaaagccttttgatgtttataagacaataaatgatgtgatggacctggttagcagacaggcagatgaaaggggaataaaggttgaacagacaatagagatcgagcaccggaaattactgggaagctccctttatctgaagcgcatgctgatgaatatcctgagtaatgctgtgaaatacaataaggattatggaaacatagatctaagctgtaaagaaatcccgtcacacagtacagaaagtacaatgctggaatttacatgccgggatacaggtattggcatgagcagcggatttaaagagcatgtttttgaatcttttgccagggagcaaaagggcggagcttctaaatttgggggaacaggtttagggatgaccatcaccaagaacctggcagaaaaaatgggtggaacgatcacctttgaaagtgagagggacaaaggtacgacctttgtgctccgggtcccatttaaaatagacctggatgcggataaacataaagaacagaagaatgtatcggaaagatccataaaggatctgaatatccttctggtagaagataatgagctgaatatggaaattgctgaatttttgctccagaatgagggcgcccaggtgacgaaagcatggaatggacaggaagcagttgagatattcgaaaaaagcagatccggtgaatttgatgtcattcttatggatattatgatgccggtcatgaatggctatgaagcagcaaagatgatccggtctctggacaggaaagatgcaaaggtggtccccatcatcgcaatgacagcaaatgcctttaccgaggataggctgaaagcaaaagaagcagggatggatgaacatattgcaaaacccgttgatgtaaaattactggtaaaagtgatcagcagattggtggaaaatagtttttgggggatccgtaatgaaaaagaaaaaatggaataggttgttttctgtactttttgtgatggtgacagttatatcacttctgtcaggctgtggcagaaagagtgcagaaaaagaagatgcagaaacgatcacagtatatttgtggtccacgcagctgtatgaaaaatatgcaccatacatccagaaacagcttccggatattaatattgaatttgtggtaggtaataatgacctggatttctaccggtttctgaaggaaaacggtggattgccggatattataacctgctgccggttttcactccatgatgcaagcccacttaaagacagcctgatggatctttccacaaccaatgaggcaggtgctgtctataatacatacattaacagttttacgaaccaggatggcagcgtaaactggcttcctgtgtgtgcagatgcccatggctttgtagtgaacagggatctttttgaaaagtatgatattcctctgccaacggattacgaaagctttgtttctgcatgcagggaatttaaaaaagcaggtatccgtggttttgcggcagactattattatgattatacatgtatggaaacgctgcagggactgtctgcatcagagctttcttctgcagccggacgcaaatggcgtaccatctacagtgatccggaaaatacaaagagagaaggcctggacagtacagtctggccggaggcttttgaacgtatggagcgattcataaaggatacaggattgagccgggatgatctggatatgaattatgatgatgtgattgaactgtacaaaaacggtaaggttgccatgtatttcggcagctcttccggtgtaaagatatttcaggatcagggcatcaacacaacatttctgccattttttcaacagaacggcgaaaagtggctgatgactacaccctatttccaggtggcattaaaccgtgatctgacacaggatgaaacacgccggcagaaggcaatgaaggtgttgaatacaatgctttcagaggatgctcagaaccagatcgtttatgagggccaggatatattaagctacagtcaggatgtggatatccatcttacagaatatctgaaggatgtaaagcctgtgattgaagaaaaccatatgtatatccgtattgcgtcaaatgactttttcgccatttctaaggacgtggtttccaaaatgatctcaggggaatacaatgcagtgcaggcttatcagtcatttaatacccagcttcttgaggaaagccctatttctgaaaatatagtgctggagccacagaaaacatattccaatatctttcataccaacggggggaatgaagcgtattctgttatggcaaacactttgcgaggtatttatggcacagatgtgctgatcgcatcaggaaacagctttacaggaaatgtactgaaggcaaagtacagtgaaaaaatggcaggcagaatgatcatgccaaatggtctttgggcttacaaatgtacaatgagcgggtctgaactgaaagaaacagtcagaaactttgtagaaggctatgagggaggtctcattccctttaacaggggctctctgcctgtggtcagcggcatttctgtgaaggtcagggaaaatgacgatggctatacgctggataaagttacaaagaatggaaaagcagttggggacaatgacaggtttactgtaacctgtctggcgataccgcgacacatggaggcttatcctgcaggtaaaaatattgtatttgacagtgaagatatttctgtgaaagatacctggacaggacatatttcgaagggtaatgttattcttgcagagcctgaagactacattactctgaggtgagaagaatgaatattggaaatcgtaatacaggcagagagaactttttcatgagaaaacgattaaggatagctgtctttattgttttcttcattgggatcgttttgattgctttccggtattttaagtttgtgtcgaaaacggtttatgaggaaagtgcttcccatttgacggaggtttttcatcagtcaaataatgtgttaaatgaactggcaaataaaaatctgacctatcttcatatgtggggggagtatctgaagaaggtttctgatgaaagcgagatccgtgattatatagataaagcccaggaagaggccggttttttatatttctattttctgtcagctgacggcaactataagatgttaacaggtgaagccgggtatcttggattacaggaaaatcttgaagataagatcacgctgggggaggatatcataacaaatgcagtagttcccggaaaacaacagatgcttgtatttgccagcccccagtctcatggaagctatcagggttttgaatatgatgcaattgccattgcatatgaaaacgctgatatagtagatgtattggatatctctgcttttaatggaaatgccaagagttatgtggttcatccagatggccgtgttgtcatcgatcattcctttgaggcatggggaaccgtgtataatttctttggtgttttaagagagcattctaatatttccgaaaaggagatccttgaactttcagagaaatttaaagagagacgtacagatacgatgctggtaaatctggatggaagtaattactatctggtttatggaagctcggaatgccaggactggatatttctgggacttgtccaggctgatatagtcaatgccagcatgaattccctgcagcttcggactatgctccttggaggaaccatagtgttcggttttgctgtctttattattgaactgatcctccaaaagaacaggataagcctgaaaagaagggatgttgagatcctctatagggatgagctgtttcaaaagctgtccatgagtgtagatgacgtttttctgatgctggatgcaaaaacatataaggcagattatgtaagtcccaatgtggaaaaactgctgggcattacagtagaacagatccaaaaggatattagcgtcttgggaaaactgcattccgaagattgtgaagatccaaagaagaattatctgaaagagatccaggtaaatgagcagcaggaatgggattttgaatatgttcaccagaaaacaggggaacaacgctggtttcatattattgcaatgggcagtgaggtaaacggaaaaaagaaatatatcctggttatgtctgaccgtaccgttgataagaaaatgaaccaggccctttatgaggcagtccgcgctgcggaaactgccaaccgggcaaagagtacattcctttccaacatgtcccatgatatccgtacgccaatgaatgctgttatcggttttactacactggctgtaagcaacattgataataaggaaaaagtcagggattatctgggaaagatcctttcatccagcaaccatctgctttcactgatcaatgatgtactggatatgagccgtattgagagcggaaagatccatctggaagaaaccgaggtcagtctgtctgatatgcttcatgatctgaagacgatcatcagtggacatatctatgcgaagcagctggagctttatatggatgccatggatgttacagatgaggatgtttattgtgataaaaccagactgaaccaggtgctgctgaatcttttgtctaatgcgatcaaatttacgcctgcagggggaaccgtttctgtccggctgaagcagtttccagggacgaaaaagggcagtgggctgtatgagatccgggtaaaggatagcgggatcggtatgagccaggaatttatacagaggatcttttctccttttgaacgggagcggacttccacagtcagcaggactcaggggacaggacttggcatggcaattaccaagaatattgtggatatgatggggggaacgattgaagttcggacagagcagggcaaaggaactgaattcatagtccgtctgccattgcggatccagtcagagcagcgcagcatagagaagatcgcagagctggaagaccttaaggcattggttgtagatgatgattttaatacctgtgacagtgtgacaaagatgcttgtaaaggttggaatgcgttcagaatggacactttccggtaaggaggccgttcttcgtgcgcggcagtctatggaactgggggatgcattccatgcttatatcattgactggcgtctgccggatatgaatggcattgaagtcacccgtcagatccgcagtctgggcgatgatacgccgatcattatcctgactgcttatgactggtcagatattgaagtagaagccagagcagcaggagtaaatgcattttgcgcaaaaccgctgtttatgtcagatatcagagagacactgatgactgctatcggccagaagcagaccggggcagagaactgtatccttccggaaacaggttccgatttcagaggcagatgtatactgcttgtggaagacaatgagttaaaccgtgaaattgctgaggagattcttaaacaatatggattcctggttgatatagcggaaaatggagcagtggcagtggagaaagtgaagaattcagcaccaggcacttatgatctggtgcttatggatattcagatgcctgtaatgaacggatatgaggccacggagcagatccgggcactggaggatccggcactggcaaagatcaggatccttgcaatgactgccaatgcttttgacgaagacagaaagaaagcgctgaaatgtggtatggatggatttatgtccaagccgatcgtaatggaagaattgatccgtgaattgcaaaataatatgaaatgagccagatcacagccatttacccatgttttttggcggggctaaagtctaaaaaacctcctgcaaacttgcttgcaggaggtttttctgaccttttgaacatagtatttttgaacataatattttttgaacatagtatctttggccctggtatcataaaatccaggatcatcttaatttccatatatcccggtcatactccccgatcgttctgtcagaggagaaatatccggcctggctgatgttgactaacatttttctcgcccataaggtgcggtcttcgtagtcggcgaaggccttttcttttgcttcgcagtaggatttgaagtctgggaaggtcatgaaccagtctttggttaacagttctttgtacagacgttccaggttttctttgtcgcctacggctaacattttcttgctgatgatgaaatcaacagcttctttgatagccgggtctgcatcgtagtagtctttggagcagtagttggctttcttgtagcgctcgatgactgtttcgctggagtcaccgaagatgtagatattgtcatcgcctaccagttcgtggatctctacgttggcgccgtcatcagttccaagggttacggcaccatttaacatgaatttcatgtttccggttccgctggcttctttggaagcaagggagatctgctcggaaatgtcgcaggccgggatcagtttttctgccagagtgacattgtaattatttaccataactacatttaagtatggttttacctcaggatctttgtcaatgatctgctgcaggcagaggatcatatggataatgtccttggcaatgatgtaggcaggtgctgcctttgccccgaagatggcagtgatcggtgtagttggctttttgccttttttgatctctaaatatttgtggatgagatacagggcgttcatctgctgtctcttgtactcatggagacgtttgatctggatgtcgaaaatggagtccgggttaatagtgatgccctgggtctcttccagatatttagccagctctgcttttttctgagccttaatgtctaacaggcggtaaagctgttttaaatttttggtgataactggtgtatctaatttctttaattcttctgcgtctttcttaaatccgtctccaataaattcagtgatgaaattagttagttccggattgctgtggagcagccaacgacggaaggtaataccattggtcttgttattgaacttctcaggataaagcttgtagaagttgtttaattctgtctcttttaaaatatcggtatgaagagctgcaacaccgtttacgctgaaaccatagtggatatcaatgtgggccatgtgtaccaggtcatttttatcgataatatatacagatggatcatcgaatttgcggcgtaccttatcatctaaaacttccataataggaagaagctgtggaactgcctctttgaagaattctaccggccatttttccagtgcttctgccaggatggtgtggttggtgtatgcacaacagtggcttactacctcaatggcatcgtccatttccatgttgtgttcggtggtcagcaggcggatcagttccgggatgaccatagttggatgggtgtcgttgatctggatcacggcatagtcagccaggtcataaagggtagaacctttggtaatggcttcgtctaaaatcagtcttgcggcattgcttaccatgaaatactgctggtagatacgcaggatgcgtccttctttgtcgctgtcgtctggatagaggaagagagtcaggttctttgcaatgtcggtcttatcaaaggaaatgccgtcctctacaatgctttcatctacagtttccacatcaaagaggtggagcttattggtgcggttgttgtagccggtgacttcaatgtcatacatacgggatgtaagggtgaagtttttgtatggaaccttataggtaacatctgtttttgtcagccaggaagtattctcgatccaaggatttggttcttctgcctgtttgttgtctttaaacagctgtttgaaaagaccgaaatggtaatttaaaccaactccgtcaccgtttaagcccagagtagcaatggagtctaagaagcaggcagccagacgtcccagaccgccgtttccaagagatggctctggttctgtttcttctactgcacttaaggattttccattttcttccagaaggttctttactgtatcatagatcccaagattgatcatgttgttggaaagcagtttgccgatgagaaactcagcggagatataatacagttttttctttccctgattggactctttgtcctttgccatttcctggaccagagataaaagtccggtataaagctctttttcagagcaggcagagatctctttgccgcaaagggcagtcagtctgttttttaatgtttcttttgtcattgtatgttcaaccatgaaatccatttcctttctgtggtgatatgtcaatatctggcccgtttcattttctgtgtttttatgtgtttattatagaaaataaatctttttccgtcttgtagaatgccagtatattatagtacaatactatcaaaaatgtaaaaaatatagaaacatgataaagaaatggaaaataaataaaaaaatacaggataacggaaggaggagagaaaaatgaaccgggggtaccatgaaataaaggaacatggaaaaagagagtttccgtttaatatttatccctgctcgatcccggtagatttctcccatgtggctcttcactggcatgaagaaatggaaattattgctgtgaagaagggaaaggggcggatcacagtggatacagtgtcttatcctgtggaggaaggagacattctggctgtttttccgggacaacttcatgcgatctcctgtgggaatggtgagagaatggagtacgaaaatatcattttccgcctttctatgctgatgggggataatggagacggctgtaccgtacattttttgaaaccgcttcaggaagggcaggcgaaaaatccggtcctgatacaaagaaatcagccggatcatgaagtgtttggaaaggtgatacaggagctggaccgtttttcggagatacgtggtaatgggtatcagctggcggtcaagggtcagttatttttgtttttgtattatgcttatggcagaggcatcttgtttacagagaagaagccgggacatgcaagagagaaaatcaaggggatactggagtacatccgggaacattttggggaagagattacgatcaggcaggcggcagagctgtgcttttacagtgagtcccactttatgaagtattttaagcagtatgcggggatgccatttatccagtatctcaatgattaccggctgacaagagccggggaatatctgaaaatgacagaggaaaatgtgacccagatcgcattaaaatgcgggtttgaaaatctgtcttattttaaccggttgtttcgccggaagtttggtgtgacgcccaggcagtaccgggaagagcaggaagctgcagcaggggtgtcaggagagtcttcgcctttgttgtaggagaaggggaaatgtgctacactaagatataagtataaatgaaaggcaagtacaggaaagattttacgggtacatgtacttttaagcaaaaggggataaataatatgagagaatgtggcatgcttcttccaatcgccagtctgccatctaagtatggcattggctgtttttcaaaagaagcttatgaatttgtagatcagttaaaggaaggcggacagagctactggcagatccttcccttaggacctaccggttttggggactcgccctatcaggcgttttctgcatttgctggaaatccttattttattgatctggagcagctggtcggagaaggtcttcttacagaagatgagtgtgaagaggctgattttggtgatgatgaccggtatattgcctatgataagatctataaagcgcggttcaaggtcctgaaaaaggcttatgaacggtggaaaaaagaccatcatcagttccttaagtctaagctggatcctgaaaccatagaatactgcttttatatggcagtaaaagatcattttaaaagtgccagctggaacaaatgggataaagatatccgcctgcgtaagcctgcggcagtagagaaatataaaaaaatgctggcagatgagatcggattttatgaattccagcagattgaatttaatgaacagtggagccgcttaaaggcttatgccaatgaaaatggtatccgtattatcggggatatccccatctatgtagcttttgacggggctgacagctgggctcatccggagttgttccagtttgatgaggaatgtctgccaaaggcagtggccggctgcccaccggatgcattttcagcaacaggccagctttggggaaatccgttgtatgattggggatatcataagaaagatcattacagctggtggatcaagcgtatggaatacagcctgaagctgtatgatgtggtgcgtgtggatcatttcagaggttttgaggcttattattccattccttatggagatcctaccgctgagtttggacattgggaaaagggaccgggactggatctgtttgcccggttgaaaaagagtctgaaaaaagaagaactgccgatcattgcggaagatctgggatttctgacaccggaagtccatgagatgttaaaagaaagcggcttcccgggaatgaaggtactggaatttgcctttgatgattcagaaaacagcgattacctgcctcataaataccaggaaaactgtattgtgtatacaggaacccatgataatgagacactggtgggctggtatgagaacatgaaccgtagaaataagtcctttgcaagggaatacatgggttgccgccatacaccaaagaaggagatgcactgggagttcatccgcctggctatggcaagtccggcgaagctggcagtgataccggttcaggattatctgggacttggggcagaggcccggatcaatgagccttccacacttggaaaaaactggaaatggagactgctaccgggagaaataaccggggatgttttgaaacagtgccggagaatggcaaaattgtacggacgccttccggaaacagtgtcagacataaatatgtaatatgtttaaggaattgttatgtaaatattcaaaattaattcatgtatttgcattaattatctgataaaatataatcatccgaaggatagaactatatccgatttttaggaggggtagatatgagagatcagaaacattggatgaaaaactggatcagggcattggctgtgggaacgatgatcgccgcagcggttcccctttctgttatggcagcagaaaagggctggatcaataaggacggtgcggcccattatgtggacagcaatggctcttatgtaaaaaatcagtggaaaacttcccagggagtttcctattatctggatgaaaacggagatctggcgaagaatgtatgggttgacggtacttactatgccggagaagatggcagtatgacaaaggatgcctggatctatgtggatgaaaatgatggctccatgaaatccggctggtattatctgaaccggaatggaaaagtggagaagaatgactggaagaccataggaaaaggcaagtattgttttgacagcgatggacggatgcgtaccggctggcattatgagaacggagatatttattatctgggaaatggttcggaaggttataccagaagtggctggtattttctggaaagtgatggaaagaaacgtccggcagagggaagtgtttcaaaggatctttccggggagtctgaaaatggaagatggtattatttccagtccaacggcaaagccagaaaaggtgaaaatggtgctccaaaggaaacaaccattgatggaaagaaatattattttgacgaaaatggtgttatgcttaccggctggcagtgtgtaaaggaaaaggcagagccgggagacgggacaggcatcagccgttttgtatatctgggcggaaaagaaaaaggcatgttaaagggccagtggtttgagacaactgaaaagccatgggatacaaaggcatggagtacagctcttaatacccaggcagtgagaaagaacaacacagacgagacagctcttatgaagaaagacggatcccgatggttctatctggaaaatgatggaactcccctgtttttatctgcggatgcaacaggattaaaagacggggctgtaaaattagacggaagatattatttctttgactcttacggtgtctgccagtccggaatgatcaaatttacttccggcggtaagacagagaccgcttactttgatccggaagcaggcggcgccctgagtattggacgcaataccaatgtagttgataagagagacaaggtttacactttctgttccggtacttccggctctgaaaagggctgcggcattaacggcgtgaaggatggatttttgtattataatggccttttagtcagtgccaaagagggcagctcctatgagccttttaaggtttccggtcaggtttacctggtaaatgaggcaggaaaggtgcagacagaggaaaagaagtattcttctgatggaaatgctgcatacactattgaaaatggaaaagtatttactttagatgaaaatggtgagaaaaagagcgcggccacaggtttaagccttccgtatgcaagttggaagatccagtatcagagatagaagtgaatagaggaaacaaacatagatataaaaatggttacagttcagacatgacatcttcttgtttccatattcatgaaaacaagaagcctgatggttccaccatatgctgatttgaacaagaaagcgcttatgcaagcaagcttgcaacacactttctcattcaaaccagcgcatggctgaactgtaacacaaaatgctgcagggacatcggatcctgcagcatttttgcacttcactgtatacatgggaatacttgaaaaaaaaatggcggtctgctatacttgactaacgaaaaacttcgtaaaatgaggagaccccggtcgtttccaaccagggcaattatgaaaaatctatgtgcaatttgactaataacctgtttttttattacctctttcttatgaaaatagtataaaaaataaatgtgaacgaaatgtgaacatattgtaaacagattataaaacattgtacaggaaaaagaaacaatatgtgtaaatcaaaagacaaaagaatgagcgcgataagcatctcagggagggagaaatggaacaggaattaaacagaaaaaccatggtgatcggacatagaaatccggatacggactcgatctgttccgccatttgttatgcaaatctgaagcaggcagttactggggaagaatatatgcctgcaagagccggacatgtaaatggagagacacagtttgtactggattactttggggcagaggaaccgcagcttgtggaagatgtgcgtacccaggtaagggatattgagatccgcaagaccaaaggtgtggcagacaatatttcattaaagagagcatggaatatcatgcaggagaataatgttgtgaccattccttctgtaagggaagatggtacactggaaggcctgatcacagtaggagacatcaccaagacctacatgaatatttatgacagcagcattctgtcaaaggcaaatacacagtattccaatattattgagacactggaagcagaactgatcatcggaagcgcagaagcttatttcgaccagggaaaagtactgatcgcagctgcaaacccggatctgatggaattttacattgaaccacatgacctggttattttaggaaaccgttatgagtcccagctttgtgccattgaaatgggagctgactgtatcatcgtgtgcgaaggcgcagctgtttccatgaccattaaaaagatcgcccaggaaagaggctgtacgatcattgcaactacttatgatacttatacagcagcccgtctcatcaaccagagcatgccgatcagctactttatgaccagagagcatctgatcacatttaacagtgatgattatattgacgagatccgcgaagtgatggcaagcaagcgtcaccgcgatttcccgatcctggataaagatggccgttatctgggaatgatctcccgcagaaatctgttgggcgcaaagggaaaacaggttattttagtagatcacaatgaaaagaaccaggcagtagcaggtattgaaaatgcggagatcttagagatcatcgaccatcatcgtctgggaaccatccagactatgtcaccggtatttttccgcaaccagcctttaggctgtactgctaccattatctatcagatgtatcaggaggccggtattaaagtagagccgaagatcgcaggactgttatgcagtgccattgtatctgatacactgctgttccgttctcctacctgtactccggtggatgagatggcagcaagagcgctggctgatattgcaggcattgatattgaaaaatatgcaatggaaatgttcagtgcaggaagcaatttaaaggataagagtgacgaagagatcttctatcaggatttcaagcgctttacttccggcaaggtgaccattggtgttggacagatcacttccttaaatggtggggaactggataagttaaagggtcgtatggaagcatttatggaaaaagcactggaaaacaatggccttgatatgatattctttatgctgacgaatatattgacagagacaaccgaactgatctgtgaaggacagggagccctgcagctggcaggaaaggcattccaccaggatattgaactgttagaagaggaaggcttaaaggagccggtactgcgtctgccgggagttgtttccagaaagaagcagctgatcccggaactgatgttagcagagcaggaatagggatcagatcaagaaaggatagaaaaaatgagtaaagaatactggaagccgggaaacatgctgtatcccgttcccgctgttatggtaagctgtggaagagaaggggaaaaaccgaatatcattaccgttgcctgggccggaaccatctgctctgacccggctatggtttctatttctgtgcggaaagagcgttattcccatgatatcatcaaagagacaggggaatttgtcatcaatctggtaaataagagactggttcgggctaccgactactgtggcgtaaaatccggccgtgatgtggataaatttgctgagacacgtttaacacctcaggcatcccgctatgtaaaggcacctggtattgaggaaagtcctgtaaatatcgagtgcaaggtaacagaggtaaaagagctgggaagccatgatatgttcctggcaaaggttgtaggcgtgaccattgacaatcagtatatggatgaccgcggcaagtttaacctgaatgcttccggactgactgcctattcccacggagaatattttgaactgggtaagaagcttggaagtttcggatattctgtacgcaaacctgccaaaaagaagaaaaaacgttagttcgcgccattgctcataaggaggaaacgaaaaaatgaagccgaatattactatgatcggcatgccttcatccggtaaaagtaccgtaggtgtgcttcttgcaaagagactgggattttcttttattgatgtggacattgtgatccaggaaaaagaaggaagactgttaaaggaaattatcgctgacgagggcatggacggctttctggaagtagagaaccgcattaatgcaggtctggaagcgaaaatgtctgtgatcgctcctggcggcagcgttatttacggggaagaagcgatggctcatttaaaggagatcagtgagatcgtttacctgaaaatgagttatgaggaaatggaaaagcgtatcggaaacgtagtagaccgtggtgttgctttaaaaccgggctttaccttacgtgacctgtacaatgagcgagttccttattatgagaaatatgcggatatcgtcatcgatgaagaaggaaaaaatgccggtgagaccgttgatgaacttagaaatatcatcgagggcatgatggaccagaagatgatccagatgttcatcgatgagcagaagcgcaaactggaagaaagagaccggctgttaagtgagaaggatgaagagatccgtcagctgaaagcgcggatcgcgcaactggaaggaaagtaaagtaataagtttcccatctatgaggaaaaaatacagataggggctgccgcttgatcatctattttggatgattaaacggcagcccttatttttttaaatcctataacactatagcaattccatatacgcaaataatttattgatcccaataattcccacgatcagaagcaggatcacgatcaccagtgacacggcaagaaagaccattttatagtaaagataagctcttgcaaagtcctgcattttgttgtgttctggctggcgggccagttttttcaggtagaaccagccgtaaatgggaatgttcatgcacatgaaggtgtggaaccattcactgatctcaatgggacgggagtcataggggatttctgtattgtcaaaaacttcattccctgtgttgtcctgtaccatatttgcagacccgaagacaggctgtccagaagtcttctttttaccttttatctggcgttctgcccaaggccacagtattttcttagttttcatcgcctctgcctcctggtccatagatttctgcattgttccacttatactgttccttacttaaagcggagcgcagctgacgctgctgggattgtacctgcacttgagcctggctttctttctgggcttcttccgcctctttttcagcctgggcagcattccactcactttccgttggaagagtggtgatacgggagatggcagcctggagccttgcagaaagggaggcttcctcatcatcacctgcaacaagggaaagtttgtcgatagcatcagataccagatcttcggcatctgtttcctggtattccagattttcgatccgctctaaggcctgcataaaggtctgtttctttactgccttttcttcctgggcacgtttggcttctgcgtcttttgcagcctgttcctgtgcctgtttcttttcctctgcctgaaccgcttcataccggctgatctcatcgctcataccggcaatgatctccttaaagtagtcataccggctttccaccttctctaaaagactggcgcgaagttcgccgtcatctaacagcggcagcttggaggtaatactgttgtattcgtcttttacagtataagtatcttctacagatccgatctccttttccataaaggcatctacagaagcctgaagagtagtctctaactgttcctgctctttttcatgaagactctgttctgcgcggaactgggcagtggtgctgaaataatcttccataccggtcttggagtctactttgcgctcgactgtttccggctgtatccaatcccagggttctaagccctcatggatctgatccataacggatttccagatccttcctgcataggtggcaccatagataccaggcatatttcttggtatatcataacctacccagatcgcagtagtgtaataacgtgtatagccgcagaaccaggtatccttactgctgttggtagtaccggtctttccggctgcaggcatatcattgtccagtccaagtccctggccagtgccgtaggctgcagtaaatgtgccttttaaaacatctgtaagcataaaggcagagtcatctctgtacacctgatgggcagatggttttaaatctttggtcagttccccgtcatgttcatgttcgatcttaataatgcaggtacggtcattgtatacaccgccgtttgcaagggtgctgtagccttttgccatatccacgacccggacgccgttggtaaaaccgccgatacttaaggaaggaacattattatccacataagtcagtttctggaactgcatttctcctaagtaatccagaccataatcaatgccaatgtcctctaagatctgccatgcaacggtgtttaagcttcggtttaaagcttcacggactgttacatttccaaaataacgtccgccgctgttggaaggtccgtcggtccatttgtggtcatctaccatgcgtgtagggtaatattcaccggtatcaaaagccggaccatagtcgatgagcggcttaatggtacttcccggctgtctggcacttaaataagctctgttaaatttgtcttctgtgccgcggccgcctacaatagcaactacatagttggtcttattatcaacgatgacaccggctccctgaagagcatattttccattttcctgcagctctgtaaagccggaaagagactggtcaatctgcgcctggagctggctctggatggtactgtctatggaagtatagagcttaaagccaccgcttcggatcaggtctgatttttcagaataagcggctgtataccgatccatgtactgggtataatcttctttatctttaaaaatgtactggaactggaagttgtctttcttcattaattccagggctgcgcagtggatggcatagctgctctgataattttcatccgttccctcagactcctgctgtacgatcttaagtggggagtttactgctttttcgtaatcttctggggagagatagcctacttctttcatactgttaaggacatcattacgcttttctttggaagcgtccggatgagctaccgggtcataggcagaagggctgttgctgataccgatgaggatcgccgcttcttccggggcaagatcgcttgcgtgttttccaaaataatacaggctggcagcttctacgccatagcactgatgaccgtagaaattggtattgcagtaaaactccataatgtcagctttggagtattttttctcgatctcaggagcaagaagaatctccacgatcttccttgtaaaggtacgttcctgggtgagatatgtatttttgatcacctgctgggtaatagtgctgccgccctgggtcacatggccgccgtgtttgacaagagcgagaccggcccggaaggtggcaatccagtctacgccgccgtgactcttgaaacgacggtcctcctgggcaatgtagccgttttgcaggttcatgcttatcttacttatatctacatactgataatgacctgcgttaataagtccgatctgctttccggccttgtcatagacaacggtatcagagagcatggaaaaatcggaccgttccatctgtgccagtttgtcataggcgatctcacggcactggtctaattccggttttacctttgcatagatcagaaggccaacgatcgccatgatgataagaccggctgtgatcacagacagtatgccatggaaaagccagcccaggataccaaaacaggttgctatggggtgaccggatccatgggccatttttttgtgtgtctgcttacgtaagtctttcataatggtttaaatcctctctttaagttttcattgaaaatttttgggaaaatccacttaaaaaatctgtagttattataattcatatagaagaaaattcctagttaaattcgcagtgaaaacttaaaaacataggcttttgataggatattagaacctgcaggaatatattttataaaaattagatatagaaattataaagaaaatataaaaagagggaattgacaaatggaaaaaaaggactataatgacaactattcaagagttagacattcaaatgcgaagaacaggacaatgcttttctgagtatctacgcatggcagagagctttcggttggtgagagaaagcagcgcgacagaaaagatatcacctgcaagcagtctgtatgaaaacaggaaactgtaagtaagacagaccggggtcccgccgttaaaagggagcgtattcgtccggacagagagtcggaggataggacagagtggtcggtgcaaaccggcaataagaagtggtaacgcggagtttggaacttcgtcttcttggtgagtatccatttggggtattcgggaagatggggttctttttttactgtgaaagtatcgccaagcggcagttgtgagagtgccgtaggcacggaacaactgactttcaattggtgacgatccgcttatagaaaatggcagttggatgttttacattgaattaacaacagacaatagatcacagattacatgagaggagagtaaagattatgaatacacttgtaattgttttgatcgcagctgtatgcctctttgcaggctacacattatatggccgctggctggctaataaatggggcattgatcctaaggccaagacaccggcagttgctatggaagacggacaggactacgttcctacagacggctggaccgttttcgcacatcagttttcatccatcgcaggcgcaggccctgtaaccggtgccatccaggcagcagcatttggctggcttccagttctgttatgggtcatcatcggtggtatcttcttcggcgctgttacagactttggtgctctgtatgccagtgttaagaacgaaggaaagtccatgggacttctgatcgaaaagtacatcggaaagaccggacgtaagctgttcttattattctgctggctgtttacactgatcgttatcgcagcatttgccgacatggtagcaggtacatttaacgcgtataccgtaaaggacggtgtaacagaactgtccgcagcagcacagacaaacggcgcagccggttccatttccctgctgttcatcgtatttgcaatggtatttggcgtaatgcagaagcatttacatcttacaggttggaaagaaacagttgccggacttgcctgcaccgttgcagcactggcaatcggtatggctttcccgttagtagccggaaaagatacctggtcttatctgacctttgcttatatctttatggcagctgtaatgccaatgtggcttttaatgcagcctcgtgattacatgacaactttcatgtttgcaggaatgatcatcggtgctgttgtaggtctgttagtagctcatccaaccatgaaccttccggtttatactggatttaagaatgcaaaaatgggagatatgttcccaatcctgtttgtaactgttgcatgtggtgctgtttccggtttccacagcctggtttcctccggtacctcttccaagaccgtttccaatgaaaaggatatgttaaaagttggatacggtgcaatggtactggaaagcttattagctgttctggctctctgcgtagcaggtgctgctgcagctgctgacggaactgctgcaacaggaaccccattccagatcttctctgcaggtgttgcaggtttcctggaaatgtttggtatcccggtttatgtagcacagtgctttatgaccatgtgtgtatctgctctggctcttacaagccttgactctgtagcacgtatcggacgtatgtctttccaggaactgttcagtgtagatgatatggaacatgcagaaggctggagaaagttattctgcaacaagtatttctcaactgttatcactctggcatgtggctttatcttaacaaagattggatattccaacatctggcctctgttcggaagcgcaaaccagctgttaagcgcactggttctgatcactctgtgcgtattcttaaaagtaaccggaagagagaacaagactctgttcccaccactgatcatcatgctctgcgtaacctttactgcactggttgaaagaaccattgccctggtaaatgcatttggcgcaggaactgctgtatttatggtagagggactgcagctgatcattgccatcctgttaatggtccttggtgtgatcattgtatacacatctggtaaggaactgtttaataagaaagctgaagtaaagcacagcaaggaaggtaagcttgcataagctggttcaggaataaaaagggttttggattaagatatgaaataaaaaatggcggatatgggatttgaactctcatatctgccattttttgttgtcatgtgtctgttaagattttgtgttatctggcccagccgtaggagcattttacagcacggtcccagccggatatcatttcttcccgtttttcgtccgggatgtccggggtaaatgttttatcaatttcccagttttttacaacttcttctttatctttccagtatcccacagccagtcccgcaagataagcagcgcccatagctgtggtttccacgcatttggggcgttttacagtaagatttaagatatcggactgggtctgcatgagatagttgttggcactggcacctccgtctacttttaaggaggtcagatctatgccggagtctgctttcatggcctttaaaacgtcattggtctggtagcaaagggaatccaaggtggcacggatgatgtggtatttatttacacctctggtgatgccggtgatggttcccctggcatactgatcccagtgaggcgcgcccagaccggtaaaggcgggaactacatagcagccgttcgtatcaggaactttggttgccatgtattcggagtcagcagcagagtcgataaggcgcatttcgtcacggagccactggatggcagctccggcaacaaaaatagaaccttccagggcataggttactttgccgtccatgccccaggcaatggtggttaccaggccatttttggaaaagacaggtgcatttcctgtattcatcagcataaagcagccggtgccataggtatttttcacatcccccgcttcaaaacaggtctggccgaataaggcggcctgctggtccccggctgcaccactgatcgggatgggaccaccaaagaactgggagtctgtttctccgtaaacgcagctggatggcataacttttggcagcatacattttgggatatttaattcttttaagatgtcctcatcccactgcagagagttgatattaaaaagcatggtgcgggaggcattggaatagtcggtcacatggatacggccctttgtcagcttccagatcagccatgtttccaccgttccaaagagaagttcccctttttgggcccgttctctggcgccttctacatgatccaggatccattttaacttggtgccggaaaaataggcatcgatcacaaggccggttttttggcggaaagtatctgtaaggcctttggctttcagagagtcacaataatcagaggtcctgcggcactgccatacaatcgcgtggaatatgggttctcctgtatgcctgtcccatacgatcgtggtctctcgctgattggtaatgccgatggcggcaatgtctgctgctgacgcgctgatttttgacattgcttccacagcaacgcctaactgggtggaccagatctcatttgcatcatgttccacccagcctggttttggaaaatactgggtaaattctttctgggcaagactgcagatctccccttttttattaaacaggatacagcggctgctggtagtccccgcatccagtgccatgatatagtctgccatgtttctcctcctgtagataatgttttccaaaatttgttttaaattttattttaatatcattttaccatagcagcaatgggttcacaagcatggtctggacgttgacatttttataagaaaaagcctataatatgaggataagtacatgatatgtacaggacactggtaagtgcatcaaacataaggaggatgatccatatggcatttttagatcagatcagtaaaaatcttgcaggttacggaaaagaagctgcaaaaaaggcgaaagatacagctgagatctttcagttaaaagctgagatccgcggagaaaaacagaagatcaatgagctgtatgcagctattggtgctgtgtattttaaaaatcacagagacgagtctgaggatgagtacaaaatgttcttccctgagatcgaaaacgcaatggagcacattgcagaactggaagaaaagttaaaacagctggataatacagaaaaatgcccctgctgtaatgcactggtaagaaaaggggacgctttctgcagcaaatgtggagcagctcttcatcaggaagaggagacagcagagaaagataatgcagatgttgtaactgaggatgattttgtcccggaagaggctgcagaagagccggtaaaagaccagaaagaagacctggtggaagagccaggtgaaatgactgaaaatacgacagaagaagagacaaagcaggaagaggagccggtttcagagccggaagaatgaagcatgggagaaaaaaagacagggctggtgcttgaaggcggcggcatgagaggtatttatacagcaggagttctggatgtgtttatggaaaacggcattacctttgatggtgtgatcggtgtatccgcaggtgcgatccatggatgttcctttgtatccggacagaaaggcagaagtatccggtattacatgaagtattgccgcaactggcagtttatgagctttcgcagccttcttttaactggtaacattgcaggagagaaattctgctatcacacactgcctgaaaagctggatccatatgattatgaggcatttaagaaaagccctacaaaattttatgtaggctgcagcaatgtggagactggaaaggcagagtatcttcctattacagatatgaaggagcagatcgaccggatgagagcttccgcttccttaccccttgtgtctaagatcgtaaagacagcaggattgaagctgttggatggcggctgtacagacagtatcccggttaaggcttttgcgaaaatgggatatacaaaggatgttgtagttctgacccgtcataaaggctaccggaaagaaatagaaggtactggtctgacaaaacttgtatacagaaaatatccggaatttgtaaaagctgtatacagacgtccaagtgtgtataatcatacactggatgaaatcgaaaaatgggaagaagaaggaaaaatctttgtgatccggccaagcgttcctttaaccatcggacggatggaggcagacccgaagaagattaaagaagtttatgagctggggcgtgatgatgccaggagacagatcgaagatatgaaggtttttttaggaattgaataactggaataatgtttggacttaaatgatctgggcttttaagcagggtggctgaatttctcagcgggagtatcctaaagtttgtgtaaacctccaaactgatgtaagataaaattactcagtttggaggttatttttatggcaagaagaaaagacagcccac

SEQ ID NO: 3587 - DNA, 837 bp, Unknown
  gut microbiota DNA sequence
atcaacgttgaccgccgcggattatcactgacacatgcaagacctgttatcgtaggtttcctgtgcggactgatcttaggcgacatgaacagcggtctttacatcggcggtactttcacactgatgtccttaggtgttgccgctcttggcggttcttctgtacctgattatggcgttgcaaccattattgcatgcgcatttgcaaaaacaaccggacaaggaccggaagttggtatgaccatcggtcttcctgttggtatgctgggcgtacagatggacgttttatacaagatctgcaactccttcattgcccagaaatcccagaaatatgccaatgaaaaacagtttggcaaaatgtatgctatcctttacctttgccctgttatggtagctgtattcatggcattcccaaccgctgttgcattaacagcaggcgctcctttagttcaggctatcctggatgtgcttccttcctgggtaacaggcggtctgtctgtagcaggaaagcttcttcctggtcttggtattgccatgctgctccactacatgccggcaaagaagtacttcaactacattctgatcggctttgtactcagcgcatacatgggcgtaccgatcctcggtatcgcattccttggtgtagctttagcttacaagttctatatggatgaagaagcaaaggaaaatgtaggatttgcaggaggtcttgaagatgaataatgagaatgaagtaatggaaaaagctcccgttttaacaaaaaaagactgtgtgaaaggtgccatccgctggtccttaatggcagtaacaacctttaactacgatacccagcttgctcc

SEQ ID NO: 3588 - DNA, 956 bp, Unknown
  gut microbiota DNA sequence
gttgaacatggtcccaccagagacgatgttatggcctgggcaaaagaacaggctcgcattgagaccgaaaagtttgaacaggaaaaagcgaatcattgtattcctattactttccatccaaaccgaaagatcgcccatggagaaaagcgaaaatttcagggaggttaccttttcctgcagtctctttattatgaacttggtttaaacaaggtatgtcgaaagattcgagataaacatcactatgattatgatttgaacgcgatcttatccgatctcatctatacacgcattttagaaccaggcagcaaacgttcttcttttgaaacggctaaaaacttcctagaagcacccacttatcagcttcatgatatttaccgggcattgaatgttctttcagaagaatgcgatctgattcagtcagagctatatcgcaattcaaagtctgttttaaaacgtaacgatggggtcctttactacgactgtaccaactactactttgagattgaacaagaagatggagataaaaaatacggaaaaagtaaagaacaccgtccaaaccctatcgtgcagatgggactctttaccgatggagatggaatcccactggctttcagcatatttccaggaaatcaaaatgaacagacatctttgaaaccactcgagaaaaaagtgattgaggagtttgggtgtgaagagtttatcttctgttctgatgcaggccttggttctgaaaataaccggctcttaaatcacagcaagaagcgctcttatatcgtaacccagtctatcaaaaaacttccagaagaataccggacacttgcactaaacaaaaaaggattccggtgcctctcagaccataaagcggtcgatctgaacagcctgacagacgatgataaagaggaacttttttataaagaagaaccttacagttccaaaaagatggaacagcgtctgtt

SEQ ID NO: 3589 - DNA, 1330 bp, Unknown
  gut microbiota DNA sequence
tggatcgccagaggcgcgcagccatttccatttacactgacaatatctgcgcccataagggacagtggttccataatacgcttcatgggacgtttctggatggaagcgtcacctgttaaagttacgtcaaagttctgtgcagataaaataccggagatcaggcgggtagtagtgccgctgtttccgcagtccagtatggtctccggctttttaagaccgtgaaggccatttccatgtaccaggacgatatcccctttattttcaatggcaacgcccatacgttcaaaacaggagatggtagacagacagtcagctccctgtaaaaatcctgtgatctcggtggttccctttgcaagagagccgaacatcacggcacggtgggaaatagatttatctcccggaaccgtgatttctccctttaatgggcctgattttttaaattccatatgtttcctcccagacaggtagacattacagtcttaccatttcgtatttataatattccagccgtttccaggctgcggtcatagatgcttcatcataaaattcgatctttaaggcaccttctccccgttctctgttgttattgataccaatatttttaatactgatgcctttggctgccagaataactgcgatggtggagatcgcacctacctcatcggccacatctacagaaaaagcataagaaggttccacagagcccttggcccggtcagtaatggtatttcggtagtctctggatttttcaaacagtttataaatcgcttctccctgatgtccttttatttcagaaaggatgtcctgaagggaaccgatataacgttctaacatatctgcaataggttccacattggtcatacagatctgctcccacatttcaggagaggaagacgcaatacgggtaatatccttaaaaccgcctgcagctacccgtttcatggttccggcaggtgagtcggcatcttttaccagatttacaaggctggaagcaaccagatggggcagatgactgatggcagccaccactttatcatgttccctgtagtcaagtaccagtgggatagcacctacggtctgggccactgcgataatacggttggcattttcggcatattttggtggaatattaccggtttcgctgccgctctggtcaaggccttccggcggtgtaacaatataataagcattttcaaggagatgatccgttgcgttttcgtatcctgttttttcagaaccggccataggatgaccgcctacaaagcagtctgtaaggccctggcgcaggatctcttcgtggatgtccgttttggtgcttcctacatccgtg

SEQ ID NO: 3590 - DNA, 44791 bp, Unknown
  gut microbiota DNA sequence
cagatactgtgcattgtattccaccggcgtacataaaaagatcaggtcacattcttttaactgttcgtcaatgccgtctaaaataacatctacaataccgtctttttttgcctgctccagcttggaacgggtgcgcatataggccatgatgcggatatccggacgggctcttttaatgcccttcgctaaggaaccgccgataaggccaaggccgataaaggcaatggttgtatcattcatggtaaatttttccattttaaaatcgctccttacattatagaatgttctatcggagatacagaatcacctgaaaaccttcacaaagatagatgtcctctcggagtctttcctgcacctgcttttgtggccgattttccaccagtagcacccgaatttcatcaacgtacgcaccgcgtacgcctcagaaatttgggcacaactgacaaaaaatcttctcacaaaatcaagcacagaaagattccgagagaacataaaggttttcaggtgtttgggctgtgaatgataggtggttatctggcttcaaaagttctgccagccagatccacatatggctttaagtcagccattaatttgtcaaatgcatcaaaggtaagagactgaggaccgtcagaaagggcttttgccggatctggatgaacctcgatcatcagtccgtcggcacctactgcaactgcagcctttgcaagaggttctacataggctcttacgccggttgcatggcttggatctacgatcactggaagatgactcttctggcggatcacaggaaccgcactgatatccagggtgtttctggtagaagtttcgtaggtgcggataccacgctcacataaaacgatgtttgggtttccttctgaaataatgtattcagctgcattcagccactcatctatggtagcacataagccgcgttttaacaatacaggcattcctgattttccggcttcttttaacagctcgaagttctgcatatttctggcgccgatctggagcatgtctacatatttaacagcagcttcaatggcatgggcgctggtaacttcacagatcacgttcagtccggttgcttctctggcttccttcatatattttaagccttcttcttccagtccctggaaagagtatggggaagtacggggcttgtaagcaccgccgcgaaggaaggtagccccggctttctttacagcgaaagcagtggaaagcagctgttcctttgactcaatagcgcagggacctgccataacagtcatggttcctggtccgatgtgggtgttgcctacaggaataatggagtcatctgggtggaattttttgttgaccagtttgtaagactctgtgacagcaacgaccttgtcaacaccttcgctcatttcaatattgcttccggcaagtctgctcttatcacctacaacaccaacgatcgtgacctgggaaccttcagaaagatgggcctgaagtccttttgactcaatgagggaagttactttttcaacagcttctttggaagcctgtggtttcataataatgatcatagtctgttatactccttatccgcataatggtttcttgtatatcggctctgtatgttagatgcccctttttaccagatatcggattgcggtgagcatgatgtgctttttcaatccaggtatctcttaacttgcagacagtttaatacataaaagcgtaaaagtcaacactttaatgctttaaacttttacgcttttatgtaactcaggctataaatagcggccggtctggctgtttggatcttttgcaagctgttccggtgtctcgcaggcaacgatacggccgccgtctgctccgcctccaggtcccatatcaataatatagtcagcattgcggatcacatccaggtcatgttcaatgaccacaacagttgctccattttcgatcagggtctgaaataccttaaggagagtctgcacatccagaggatgcagcccaatggtaggttcatcaaagataaacagggagtcattttgcagtttgcccatttcgctggccaatttcagtctctgggcctcaccgccggaaagactgggtgtttcttctcctaaagtcaggtatccaagtccaagctcttttaacacagtgagccgctgttttaccagtttgaggtcatcgcaggcttcaagggctgtatggatgtccatgtccataagttccgggagagaaacactttgcccttttttattcgtgtatttaataagagatgcctctttggaatatctggaacctctgcactccgggcatggaatgtccacatcgggcagaaactgtacgtccaggctgacctggccggtgccgtcacatacggggcagcgaagctttcctgtattataggaaaaatcaccagctttatatcccatgtttttggcagctgccgtttttgcaaatacttttcgcagttcatcgtggacattggcataagtagcagcagtggagcggacattgatgccaataggagttgcatcgatcagttttacctgggaaatacctgccgggtccacagaaaggacatgggaaggcagaggcgtttttgcaatagctgcctctatgccgggaacaaggctttccagaataagagtggtctttccagaaccggaaacaccggttacaacggtaagacggcctttggggatctttaccttaagtggttttactgtatggatggcaccgatagaaagggagatggccccatgttcaaacaggtcattttcctggatcaccggacgcaggcgtttggcgtattccggctttagaaaagcaccgatgcgggatactttattttccacaatatcagaaatagtcccttctgcgatcacctgtcccccttttgcgcctgcttccggccccatttcaatgagccagtctgcatgggataagatctgtgtgtcatggtctactaaaataacggaatttccgtcagcgatcagatcatccataacccctgtcagtccaacgatatttaccgggtggagtccaatggacggctcgtccagtacatagaggacacctgtggttcggtttctcacggctctggctaactgcattctctggcgctcccctgtagaaagagtagaagcagcccggtctaaggagagatagccaagtcccagctccataagccgttttgcagctgtctggaaggagtcgcagatgctttctgccattggcaccatttccgctgggagagaactgggaacattgtccacccatgtgatcagctgggataaggtcatttcacaggctttatcaagagtgatcccctgtaatttcggcgctctggcccgttcatttaaacgggaaccatggcagtccgggcatgcatcttcttttaaaaacttctccacccgcttcatacctttttcatcttttactttggaaagagcattttctacggtataaacagcgttaaagtaggtaaaatccagttctcctgcctgattggagtttttggcgtgatagaaaatatgttttttctcagcaggtccatggaaaacgatgtctttttccttttctgttaattccttaaaaggcacatcggtgcgcacacccatttcccggcatacatcggtcatcaaagaccacataagagtattccagggagccacagccccttcgtcaatggttaaggagtcatctggcaccagggtatttaagtctacggtgcgaaccgttcccgttccattgcaggtgcggcaggctccctggctgttaaatgccagttcctctgcagaaggagcaaaaaagtggatgccgcattcagggcagaccagttcttttccggcagccactgccagtgtgggagccagataatgtccatttggacagcagtgggaagccagacgggaatacatcaggcgcaggctgtttaaaagttctgtaccggttccaaaggtgcttcggatgccgggaacgccgggacgctgatgcagggcgagagcagcgggaacatgtaagatctcatccacactggctttggatgcctgggtcatgcgtcttcttgtataggtagaaagagactccagatagcgtctggagccctctgcatatagtacgcctaaagccagagaggactttccggagccggagacaccggcaatggctacgatctggtttaagggtacgtctacattgatatttttaagattatgcacccgggcgccgcggatctgtattttctgtatattgcttttaaaggttttattttcagacataaaatgtgcatacctttctcattattctgcaactattttaacaatctccgtaaggaattgcaagaaaagcagaccgtcacatgacggaaccgtaattcaattatgacaaaactgtcattttagagtcatgatcatttaattttgtatgtataaaataaaatacaaatgaaggaggaaaaaattatggcagcagcaattggatttttaatgatcatcgtgatcgtagcccttcttttaaaggggaaaatgtcacctattgtagtattggctatcgtcccaaccatctcagccctgatcctggggtttgttcctacagacattctgggatttattgcagatggcattaagacaactaccagtaatggtattttgtttattttttctgttatttattttggggttttgtctgatacaggattgtttgacgtgatcgtaaactggcttgtaaaaaaggctggaaataatgtgatcgcagttactgtggtaactgcaatgatcgcaaccattgcccatttggatggaaccaccgctgtaacagttctgattacgatcccggcaatgtatccagtatacaagagaatgaatattgatgcccggatcttactgtgtattaccggagcctgtatgggtgtcatgaatctgcttccatggggcggacctacagcaagggcggcaactgtacttcagatggacgcaacagagttgtggcatatgctgatcccgcttcagattgttggtctggtcatgaatagtgtgatcgccgttttgcttggaatgtacgcggtaaaaaagggtgccggtgcaggaaaaggtgtagaagttgagacaaatgaaaaagaaaaggcagaaacagaagcactgaaaaaatccagaggatatctgatctttaatttccttcttacggttgctgtgatcgcagcattatcaactggtgtaggaaaatcctatgtgatctttatgttaggactttgtgttttactggcagtaaactacccggatcagaagatccaggataaactggtaaagaagcatgctccggcagcactgatcatttcagcaaccttgtttgcggcaggcgctatggtaggtatttttgatggaacaggaatgctggaagcaatggcaaatgcgatcatggcggtcattcctgcagctatgggaaaatacatccacattatttttggtatccttgcccttccttttggcctttgtgtgggaaccgatgcatatttttacggcatcatgcctctggtcatgcaggttggcgaaacatacggggttgcatccctgaacacagcacttaccatgctgatcggaaagaatctggcgctaatggtaagtccccttgtcccggctacttatctggctatcggattgacaggaacagaattaaaggatcatatgaaattcagcattccgccctattatgtggtaagcctgatcatgttagtactgggagtaattttagggatcataagtttataagagacagtaagaccataaaagcatagtaagaacacaaaagaccataaccggctgtgagaaaaagccagccggttatggtcttatttttatatatttgctatactcttttataggtacaaatgcgcttgaaagagcaaaaaatagaatggggaaatgaacatgaatacggaagaaatattgatggtagatgatgaaagagcaatccgtctggctgtacggacggctttgaccagggaaggaatgcatgtaacagaagcagctgatggcagtacagcgttagatttactaaaacagaaacatttcgatctggtgatcctggatgtgatgatggaaaatgtcagcggctatcaggtattacagactatgcgggcttggggagatcatacaccggtgatgatgctttctggaaagtcagatgagatggaccaggtgctggggctgggattcggggcagacagttatctgacaaaaccatttcatacttctgtgctgatacagacagcaaaagcattgatccggagaaaccagatatacagtcaggcatcggaagcaaggatccataaaggtccctttgctgtggacactttgaaaatggagtgtttaaaaaacggagtctccctgaattttacagcaagggaacaggcgctattccgctttctgttagagcatccgggacaggtattcacaaaggcacagctttacagccaggtgtggaatgaggcagtggtagatgataatacgatcacggtttatattaagcggatcagaagcaagatcgaggaaaatccaaaagaacctaaatatttaaaaacaatacggggaatcggatatatgctggaggtctgataaaaaatgaaatggatcaaggaaacaaaaggaaaaagacaggcagcaataggcgctgtttttctggtagtgtttctgtcactggttatggcattatcctgtgcagaattttataagcgttataaagagcaggtaatccatacagaggaaagccagctgcttaccatagccgggatcataggaaataatcttgacatgttccttaatgaacagctggagcagatcgaccttttttactcatcagaaaatgggcttttaggggaaaaaatgcagatgaaccggaaaatatcctattttctggataaaaatgagaaattgtataactggatccgtctgatatgtcctgatggcaggcagatcctttataaagcaggtacagagcctttttacgaagctgctgaggcagaacatactccggcgggacatgccacgaatgcacagatcacgggaaaaaagatatcagaagaaacaggctggtatgaaatgtacatagaaaagcaggttgaagcaaatggagctgtttatgatcttgttctttctatggatctggaacagctgtaccgtcagatcgtagagcctgtaaagatcggaaagggcggatactctattgttaaggaccaggatacctatattatcatgcatcatgtaaaaagccagattggtctggaggcattagaagaccggcaaaaaatgtatacacagttggatctggatgatctgaaacaatggctggaaagacaaaataaagaagataagggcgcaggcctgatccatacttatatatgggataatccggaactaaaagcagtaaaaagagtggctgcgtttcaggcgatctatattcagggagaacgttggatcgtgaattctacgatccctttaacagagctttcccaacctttagatactatgatggagatcctggtggggatcgctgttttatatatggtgctgctgatcacggcaacggtatacattctttataaccggttccgtaccatatcacagtacagggaaatagcgtaccttaaggaaataaaccagggaatggagatggtggcaaagaaaaatgatgagatccgccattaccagagaatacagtctcttggcatgatggcaagccatatagcacatgaatttaataattatctgaccccggtcctgatctattcggaacttctggagaacgatgataccatatcagaagaaaaccggcagatgatccatgagatcacagattccgtagataaggcatcagatctgtcaaaaaagctgctggcattttcaagacaggatacagggatccggttagaacggctggattttgcacaggaagtaagaaaggccatgtcagtagtacgacaattggttccggcagccattacattaaaaacaaaaattcctgatacacctcagtatgctcttgtaagacaaggaatggcagaacatatcctgatgaatctgtgcaaaaatgcatttcaggcaatggaacagtctgataaaaaagaactgacagtggaattagctgaaatgggaacagaccagctttgcctgcgtatttctgatacaggatgcgggatcccggaagatgtgcaaaagaagatcttcgagccattttatacaacaaaaggttccagacagggaacgggactggggctttccgtggtaagaaatatcattgcgtctgtagggggaaagattgaggtagaaagccgtcagggagaaggaacgacctttttgcttatgatccccaaaagtagttcagaagaggaaggcaatcttagaaaacgtttaaaatctgtatccaggatcgctattatatcagaagatgccaggatgtctgcttataaagggaaaaaatttgaaaagactgggcagatcgaagtttatacccatccggcagccctccttgaccgggtacagaaaacgccttctttttatggcctgatcattgcagatgaagttcttcccatgatgaatggaatcgagttatgtgaaatgatccgccggatgaatccggagatccgtcttttattgttatcagaacaggacggaagtgatgttcagtggtatctgaataatggcatgatcgaccgttttatgttgaaacaggacttttttagcgaatttgaagaggcaattaaggcaaaatgacggttaaagatgagaaaaacaggaacatgcggtgacttaaatcaaaatatctggaatgttttggaaaaatgttgtgtagaatttaacaaaaaacttgaatatttcagaaaaatatagtagaatgtacacatggcaaagacgaagcacatattacagttgtttcgcacaaataaagtgtacaggagggaagtttatgaacgtatatggtactgaacaaatccgcaacgttgtattacttgggcatggaggcgctggtaagacaacagttgcggaggcaatggctttgatcacaggtgttaccaagcgtatgggcaaagttgctgacggaaacactattagtgattatgacaaagaagagatcaagagacagttttccatttccaccacactgattcctctggaataccagggagagaacggaccggttaaggtcaacttactggatactcccggattttttgacttcgtaggtgaagtagaagaagccatcagcgttgctgatgcagccattatcgttgtaaactgtaaagcaggtatcgagcctggtacagaaagagcatgggagatgtgcgaaaagtacaatctgccaagactgatcttcgttactaatatggacgatgatcacgccagctatcgtgagctggttgtaaagctggagaaaaagttcggaagaaagatcgctcctttccagcttccaatccgtgaaaatgaaaaattcgtaggtttcgtaaacgtagtaaagatggcaggccgccgctttacaaacctcagtgattatgttgagtgcgagattccagattatgttcagaagaacttaaccatcgcaagagacgccctcatcgaggcagttgcagaaaccagtgaagaatatatggaacgttatttcctgggagaagaatttacacaggaagagatctcaggtgcattaagagcacatgttatcgaaggcgacatcgtacctgttatgatgggctccggaatcaactgccagggctttaaggttctccttcaggttattgacaaatacttcccggcaccaaatcactttgagtgtatcggtgtagacgtttccacaggcgagcgtttcaccgctaaatataatgatgacgtatccctttctgcaagagtatttaagaccatcgtagatccatttatcggaaagtattccctgatgaagatctgtactggtaccttaaagggcgatacggttgtatacaatgtaaataaagatgcagaagagaagatcggtaaagtttatgtaatgcgcggcaaggaagttatcgaagttcctgagttaaaggccggcgatatcggcgcagttgcaaaactgactgtaaccggaaccggcgataccatggcagttcgtacagctccgatcgtttaccacaaaccacagatctccacaccatatacatatatggcatacaaggcagctaataagggcgaagatgataaggtttctaccgcattagcacgtatgatggaagaagacctgaccttacaggttaagaatgatcctgaaaaccgtcagtccctgatctatggtatcggcgatcagcagttagatgttgtgatcagcaagttgcagacccgctacaaagtagacgtagttctgtccaaaccgaaatttgctttccgtgagaccttaagaaagaaagtaaaagtacagggcaaacataagaaacagtccggcggacatggccagtacggtgatgttatcatggaatttgagccatccggcgatttagagacaccatacacctttgaagagaaggtattcggtggatccgtaccgaagaactacttcccggcagtagaaaaaggactgcaggaatgcgttcttaagggaccgttggctggatatccggttgttggcttaaaggctactctgttagatggttcttatcatccggtagactcttcagaaatggcatttaagatggctactattctggcatttaaacagggctttatggatgcaaacccagtgcttttagagccgattgcttccttaaaggttgttgctcctgaccgcttcaccggcgatatcatgggtgacttaaaccgcagaagaggccgtgtattaggtatggaatctgaccaccacggcaaacaggtcatcgaagcagacattccaatgtctgaattgttcggctacaacaccgatcttcgttccatgaccggtggtttaggagactattcctatgaattcagccgctacgagcaggctcctggcgatgtacagaagcgcgaagtagaagctagggctgctgcgaaggaagaataattgagaaaacagaaataaaaagctctataaacaataagggcgggatctttgaaaggtcccgctctgttattgattttagggctatttttgtgttgttaagtaagaaaatcaggcataaggaaccagatctccgatttccgggtccatatcggtccagcgatctgcgtattcccgggacagttcagaaagacgttgaaatgcagtatctttttctatcttttttcgatagaccatacaatggatgcggtaaagagaaggtgtaaacaaaaaatatacgatattggggtccaataccatattgcttacagggataaatcctgcacctataccagaggaaacagattttacaatagaagatgcattgctggtattcaggataactacaggggtcatatgggcagaacggaacaggccgtcagccagataacggatgcaggaacctggatgctgaaggataaaaggagcaccggaaagctctcttgcaaaagtttccagatccagactctgaatatagttatagtttgagttgcgacaaatagacatccggcttgggacagccagagcaatcttttcttctttcagtggcaggatctggcctttataaagatccagggaagaaatggagccaaagacaaggtccagatcattgtttaacacttttgaaataatggtaaaggaattgccttcggacatagcaatgtcaatatttgggaattctttgcggtatatgggaataagatgggtcaccatggagatagcttttgtggtagatgtacctatttttaaaatagtagtatttttataggtttgcatggcctgctccatgtttttttccagttcaatgatttgttctgcatatttgcagaatgtctcaccggcagaagtaagggtataacggccgttcattcgtttaaacaggtggattcccagggtattttgatagttacggataaactgactgagggttggctgggaaatgtaaagatcttttgctgcctgtgtgatatttcctgctttggcaagagcaagaacgtattccatatatttaatatccataaattatgcaggtcctcctgatgcgtgtaatggtatttaatgataaatataatgaaaaatataggcaatacctataatatatataaaatacactatctgaagaggaaaatcaagggaataaattggaaaaatgatgcaaaatatataaaccataggcgcaggctataaaaaatgtgctacaaatgattggaattcctataaaaaaacatttaaaattaagatatcaagaagaggggaggacgtgcagaacttgttctgacagacgaaaaaatgaagggatatgtattaaaaagaacaggacaaatgatattggtggtatttcttctttctatttttattttccttttggtatcaatgataccaggtgatccggtttacgctatgctgggtgaggaagtttctccggaagagtacaatcgtgtattccatgaattgaagttggatcaaccggtgatcgtcaggtacttcagctggctggcggatgcgcttcatggagatctgggggagtctacacagtttcatatgaaaacatccgaagtactcgcagcaagaataccaattacattgtttttctccattgcggcatttattatcagtgttccatttggaatcctttttggagtgatcagtgcagtgaacagaggaaagcctcttgatacagtggtaactcttattgcaaatgtaactgcctgtcttccacagttctggtttgcattactgatcatgttcgtgtttgcaatgaaacttggttggcttccgtcttatggttttgactggccttggatcaatgcagcaggctggaaacagatgatcatgcctctgttttgcctttctcttggaggtattgcttctactacaagacagacacgatccagtatgctggaagtgatccggcaggactacatacgtacagcacgaagcaaaggtattgcaaacaacaaagttatttatcttcatgctttaaaaaatgctctgattcctgttattacgatccttggaatgcgtcttggaaacctgatcgccggttctatgtttgtggaatctgtttttaatattccaggaatgggatctttaatggtaaaagcgatccagtcaagagatattccggtagtacaggcgtgtgtacttgccattgcactggtatcatgcatcgtaaatctggcaacagatattctgtatgcagttgtagatccacgagtacgttttgaataagtgggaggacaaaatgaaagatacaaagaatatcaaaaagttcttaaaaacagtatttgccagaaaagtaacagtgatcaatgcaatcatagtgttaatatttatctttctggccatatttgcaccatttgtggcaccttatgatccggacaagcctgattttgcagcatttcttcagctgccaagtgcggctcatgttttaggaactgataatttcggtcgtgatgtattaagccgtatcatttacggaacaagagtcagcctaatcattggtgttctggcagttgttgtagcctgtgcagttggtacagtgcttggtatgatcgccggttactttggcggctggatcgatgatgttatcacacgattaatggaagctgtccgtgcgattcctcagattatactggcaatggcattaactgccgtttttggaagcggtatccgtaatctggcaattatccttggtatctcatctatggcaggatatgtgagaatgatgagaggtcaggtacttaccattaaacaggcagattatattatggctggaaagcttcaaggaaataaagatttccgtctgatgttcagacatattttaccaaacagtatttcaccgatcatcgttatgatgacacagcaggtaggttccactatcctggccgaagcaggtttaagcttcctgggacttggtatcagcgctccaacggcttcctggggaagcatggtaagtgagggaagaaatttcctgatggacaatccggtatatgctctggtacctggagtttgtgttgcgatcctggttatttcattaaatatgttgggtgacggcgtaagagatgcgttggatccaagactgagaggtgaatcataagatggcagagaagcatttatatgagatcaagcatattgaaaccagtttccggacagatggaaaaatgtttaaagcaatagaagacgtttccctttatctgaatcctggtgagatcatcggaatcgtaggcgagtctggaagtggtaaatcagtaacaatgatgagtgcactgcagctgatccaggaaccaggaaaggtgactggtggagaagtgtatctggatggaaatgataaaaatatgctggaatatggttcaaacagtgctgaagtccgtaagatgcgtggcggaagagtcagtatgatcttccaggaaccgatgacttctttaaatccggttctgacagtaggctttcagatccaggaaaatatcatagaacaccttcatctaagtaaggaagatgcaaaaaaacgtgccattgaaatgatgaagatggtaaatatcccagatgcagaagaacgttttgcgtattatccacagcagttttcaggtggtatgcgccagaggatcatgatcgcaatggcgatgtcttctgaaccctctgttcttgttgcagatgaggctacaacagctcttgatgttactacccaggcacagatcctggaaatgatccgtgatattgctaaaaagaccaatacagcagtagtgatcgttacccataacctgggtattgtagcaagatttgcagagcgtatttatgttatgtatgcggggggtattgttgaaacaacggatgcagaaagactgtttgaaaatccggaacatccatatacaagagctctgcttcgggcgatcccaagactggatgatgacagggaccgtatactgatccctattgagggacttccaccgaacccggcacttcgccctgagtattgtccgttttatgaccggtgcgagtatcatatggacaaatgccgggagcagaaaaagccggaattgaaagaactggagaaggaccatttctgtgcttgccatttaacagaagcagaaaaggttatgaagaaggcagaaattgatgggaagcctgtaaagaaagctcagcgcgcagtaatcggtgatgaaatctgtctggatgtaaaagatgtaaggaaatatttcccgatctataaaggaatgatgcgcaaacatatcggagatgtaaaagccattgaggatatcagtttcaaagttagaaaaggagagacattaggaatcgtaggggagtctggatgtggaaaaacaacattggcaagatgcattatgcgtgtgtatcagccggatacaggtgagattgatttcgcaggaactgatattgcgaagtttaacgacaagcagatgtatccatacagaaagaaaatggcaatgatcttccaggatccattttcctctcttgatccaagacagacagcggaatctatagttggagaatctctgctgatccataagctggtaaagaccagagaagaatatgaacaaagggtagatgaactgctgcgtatggtagatctggatccgtccatgaaaaaccgtgttccccatgagttttctggtggacagagacagagaatcggtattgcgagagctctttcttctaatccggatttgatcatctgtgatgagccaatctctgctctggatgtttcaatccaggctcagattattaacttgctggaagaacttcaggcaaaactgggacttacttatctgtttattgctcatgacctggcagtagtaaaacatatcagtgaccgtattctggtcatgtatttgggaaggatcgttgagatcgctgaatgtgaagaactttacaacaatacacttcatccttatacaaaggttcttttgggagcggtacctgttgcggatccaaaggtagaaaagaccagggagcgggtagaaatccggggtgaggtaccaagtcttaccaatcgtccggcaggatgcccgtttagtgatcgatgcagttatgcaacagagcggtgcaaaaaggaagttcctacattaaaagatattggaaatggacatgaggttgcatgtttcctgtatgaataggaaaagacatccttaaataaaaaagaaaaagcaggaggagaaatttatgagattcaaaaaaatggtatcaatgcttttagctgcatccatgtgtgcgggggcactgagcggatgcgcaggttcttcaaaaggcggaagtgaaacaactgctcaacaggagacagcaggtgaaagcagcgcagcagaaaccaaagagaaaaaaacggcaggtgcattaaaagaaggtggagatttaaagattgcgatcccccagttccagaagacattttttatgccgcagtcaacttccactggtgactggtttgcagcagaaccggttctggagcagttaggaagatctgacgaagaaggaaattatgtgccatggctggcagaaaaatttgagacagatgccgacaacctgacttttactattacactgagagatggagttaaattcagcgatggaagtccgtgtgatgcagaagctgttgcatggaatatccagcagtatgtagataacggaaaagcatctgaggtttgcaatccaaagagcattgaagtagtagatgaaaagacagtaaagattacatttgacgagtgggcaaacaactgggatagcgcaatcggtgcagtatttatctcatctaaaaaggcatatgatgacaacggcgaagaatggtgcaagacacatgcaatcggcacaggtccatttatcatggatgagtttgttactgataataaagtaacctatcataaaaatccagattaccgtattacaggacagccatatctggataccttagagatcgatatgatgtctgatgttaataccatgatgtctgcaatgctgaataaagaagtaggtgttgcaatgaaatttgaaagcgattctattatcaaacagctgcaggatgcaggatttacagcaattggacgtaaaacagctaacgtagcagatattaagcatattatctggaacagtaaatctgataagcatccaatgggagatttaaaggtacgtcaggctattatgcatgcaattccatgggatgatgtagcaggtgctctttccggtggtattggcgaagcaactcctttatttgcaacaccggattcatgggcttacaaagagggaacagaattttacgattatgatgtagagctggcaaaatctgcactggcagaagctggatatcctgatggatttgaaaccaagatttactgcaaggcacaggataatgatactgcaactgcatttcaggcaatcctgtcacagatcaatattaaggcagaagtagtaactatggatgcatctgcattggcagaaatgcagaaagaggatgacattgatggatttatcgcaaatcgtggtgcaagcaaaatggactttactgcgaactacattcgtctgtattccacagaaggtattaaaaaccatggtatcatgttagatcctcctgaatttgaagaaccattatttgctgcaagagctgctaagactttggatgaaaagaaagaaaaattacaggaagcagcagttgcactggcacatgattatgtaatgatcactccgcttgcagttatctattaccagtcatttgctgatccggctcttgctgatacaggaatctatgatgtaagtctggaacagtggactccagaagctacccattggacagaatgagaaaaaggcaggtaagattatgttaggagaacatcttaagatccagtccagagttaattcggattatacagatgaacaattacttttgatcaaggaaatggggatcaaatatgtatatgtgatcttttctgacgaagatagtaattatgaaagcgtaatgcgctttatggacagactggacaaatttggtttgacctgtacagatgcaggaaatgttggaatttataaaagtccggcgatccatctgggacttccgggaagagatgaagcaatcgaacgttttaacgattttaacagagtactggctaaggctgggatccacattggttatatgacctgggagccgaataaggtactgacttccaaatgggcagtaggcgagtacacaagaggggcagttgcaaggatcgtagatattgatgatcttgcaaagcgcccgtacacacatggaagattatataccaaagaagaaatgtgggataatttcaaatatttcctggatcgtgtacttccggtatgtgaagatattgatatgaaactggctctacatccaaatgatccgccggttgactgtctgtgtggtatttcaaatctgatcacttcttcggcagactataaacatgcgtttgaactggctggaaacagtccttatcttggaatgaaaatgtgtattggatgctggctggaaggtggagaaaatttcggaaatgtactggaagacattaaatattttgtagaaaataaaaaggttttatgtgttcatttccgcaatgtaagcagtccaatgcctcagtttgaggaaactcttctggaagatggctatatgaatatgtatgaaattatgaaagcttttgtaaaagcagattatgatggcgtattacatgcagaccatgttccgctatggggaactggtgttggaactggtggttctacaacagcatggacctacagtatgggatacatcaaggcgctgtggaaatgtgcaatggaagaggtaaacagataatatgataaatatacgggatttcggagcagtaggcgacgggatcacgctggatacggcagcagttcagaaagctctggactgctgcaaaaaaaatggcgggaccgttgttgtaccaggtggaaaaacctataaaataggtacgatccagatttactccaatacagaattgtatcttgaaagtggtgcggtgctgaaacaaagtgaccggattgaggatctaagaagtatttctatagtggataagtcaaataatgaaacagatattccctcctatatcaactgtgaatataatgggaaaccagcacattattttatttatgcaacaggagaaaatatacgtattacaggatacggcgccattgatggaaatgaatccatttattacggcactgaaaccagatatcacattgagggtgcatggtatcccagaacgccgcttctttatatagaaaatgtagatcattttacgatcacgggagtgacattgcaaaattctgcattctggactcttcatatggtaggctgtcgggatgtattggttgacggtatccggatcctgaataatttaaagcttgcaaactgtgatggcattgatccggatcactgtcagaatgtaagaatccagaattgttatattgaggctgcagatgactgtattgtactgaaaacaacagaagcagaacagaaatatggccccacagaaaatgtgatcatcagtggttgtatcctggaatctaccagtgcagctataaaattcggaactgagagcgaaggtgattttaaaaatatcataattgaagattgtatgatccgaaattcaaaccgtggagtagcacttcagcttcgtgataagggaaatattgaaaatgtgtggatccgaaacctgatgatctatacaagaaattttatcgaccagtattggggaaatgctgaaggaatctatattaccgctattgaacgtcataaggggagagcgtttggtaagatccataatgtaagactggaaaatatccagattacaggagaaagcggtgtattgatttatggttcacaggatggacatatagacggaattacattaaaagatgtttctgttgacctggttaaaaacagtaaatggccttgtgatggttatgatatccgcccctgtgatggagacggtctgctaaaaagccctatttacggtgtttacatgagaaatgtaaataatgtaacaatggagaatgttcacagcaaagcccaggaaggttttccttatggtggtgaaatcgcagagaaataataagcaggatgaggcaggaaaagggatattcataaacgagaatgaaagagaggaaaatacaatgaaaattggatttatcggacttggtatcatgggaaaacctatggctaaaaacttagtgaaagccggacatgagttagtggtttttgatttaaataaagaagctgtggcagaactggtagcatgtggggcaacttcagctaagagcagtaaggaagtagcagcacaggttgaagtagtcattactatggttcctaattctcctcatgtaagagctgccgttttaggaaaagatggtgttgcggaaggtgcgaaaccaggtctggttctgattgatatgagttctattgatccgactgaaagcaaaaagatcggtgaagagtgcatgaaatatggaatcgagatgttagatgcacctgtatcaggcggcgaaccaaaagccattgacggcacattatctgttatggtgggcggcaaaaaagatctttttgacaaatactatgatatgttaatggttatggcaggctctgttgtatatgtgggagatctgggttcaggaaatgtggctaaactggcaaatcagatgatcgttgctattaatattgcagcagtatcagaggcactgatctttgcaaagaaggcaggtacagatccagagctggtatatcaggcgatccgcggtggattagccggttctacagttatggatgcaaaggctcctatgatgttagcaggaaactataaaccaggatttcgtatcgaactgcatataaaggacttaaataatgcattaaatgcagctcatgctatcagttcaccggctcctttaacagcccagctgatggaagtaatgcagttcttaagatcagagggctgtgacaaggaagatcattccagcattatcaaatattatgaaaagattgctggtgcaagtgttgtaaaagacaaagaataatctgggagaatgatgatgaatacagattttatgaaaggtgtaatcgtccctattttaacacctattgatgaaaatgaatggattgatgaaatcaaaatgcgtgagcaggtggattttgtcatcaatggcggtgtcagtggaatactggcctttggaagcaacggcgaattttatgtgatcgaagaggatgaaatggaacgtggactgaagattattgtagatcaggcagctggccgtgttcctgtatatttcggaatcggagccatcagtacaaaaaaatgtgtgcgactggctaaaatggcagttgcatgcggggcagcaggtgtttctgttctacagccaatgttcttaaaaccgacagaaacagaattgttctgccactttaaaacaattgcagaggcaatccctgatacgccaatgcttttatacaataatccgggacgtgtgggatataccatgtctggtaatctggtagaacgtctggctcatgaagttaaaaatattgtgggaatgaaagatacaagtggtgatattacccagacttctgagtttatccgccgtacaagagatgtggattttaaggtattcggtggtaaagatacattattgtatgcgtctttatgtcatggagcagtaggtggcgtatgtacagcagctaattttatgccggagttgatcacagatgtatacaataaatatattgccggggacctgaaaggatctttagaggcacagtttaagctgaatccagtacgtctgtcaatggatggcgcaagtttcccagttgctgcaaaagatatggcaaatttacggggaagagagatcggtgatccgtataaaccaaaccttccaacgcctgaaggtccggtcctggataagatcaggaaagaaatgaagactgcgggattaatttaaactttgtttatattatccccctaaaaacgttaaaaccagagagtagtatacaaagtgttccgaaagaaatccttattgcatggaacaaaatgaaatgtactctcaccttcaataaaaagactgttgcgaaacagatacaaagaagcccatctttggatctgtctggcagcagtctttttgtgttgtatgaaaaaatacgaaggaagcgttgaaaactccggatgatcagagtttaagatttgtttatttcttttcataaaaatcttttattcttttttttattattagggtgtcttaaggatagccctctaagaaagggaaagaaaggagctttcaatatgaaactgaataaaaaaacatttatgatcgcaggagcagcagccatgcttaccacaggagcagccattccttcttttgcagcaaccagcggctgggcaacggaaggggacagctggtgttacttggatgctcagggaaacaaggtgaccaatgtgtggaaaaaatcaggaaatgactggtattatctggactcagatggtctgatggcaacggacacctgggtagatgatacttcctatgtagatatttacggtgtgagagtcacaaaccgctggatctacacagaagcaggaaccgataacgccccaaattctgaaggaggctggtattacctggatgcagccggtaaggcagtaagcgatggctggaagaccattaacaataaaaaatattatttcgactctgatggcaccatgcaatatggctggtacacagacggaagcgatacttattatctgggagatgaaaataatggtgcggcagctaccggctggctctgccttgattttgacaaggacaatgtgccaagtgacggagatgtatcggagcaggagaccataggcagcgatacagcgaaatggttttacttcctgtcaaatggcaaggcagtaaaggcggataatgatacttacaccagtaagaccatcggcggaaagaaatattattttgactccaacggcgtgatgcttacaggatgggtatctatggcaaatgaaggtgacagttccgatgtggatccgaccggtatttcttcttttaaatattttggtgatgataatgacggtcagatgagcaagggctggaagtacctttccgattatccggaagactccgatgattcttctaatattgtagaagcgactgcaagcaatgcccagcgttatggcagcagtgacggaaacggcagctggtattactttgactccaacggaaagccaaaatacttaaaggcagatgcaacgtccatgtcaaaggctacggtaaggatcaacggacagagttatttctttgatgaatatggaaaaatgcagtatggtctgatcggtattgactttggcgatggaacagagcacagcgcttactttggaaacagtgagtctgacggaaagatgcgtacagacaagcagaccagtgtaacagaggacagtggtgaccgtactaccttcttctttaaaaaataaaagacagacactcctgtttcaggcagaaaataggcctgctgcataaccttcttaagatggttgcagcaggttttttgctgtcaatatacgacccgtatattagccgagactaattcatcacacgttaaagcgataccatctaacagcaaaaatccccttcttacattctgaaccacaactaaaaagctgtagcaattacaatatatagactggacaaatgaaaataattggtttatagtatgaagcaacgacgaacaaagccgcgaagtaaggtaagtacattttaacatgaacgacaaaaaccctttgtgagcggaaatcaggaggtagaaaaatggtatcattatatgatggtggtatttatcttgtaaatggaaaagaaatcgtaccggaacaggaaagcgttaaagtagaagcccttacaggaaagaaagcagataaagaagctgcaaaaaagggaaccattgcttattctattttaagcgcccacaatacagctgataacatggaacatttaaagatccgttttgacagcatggcatcccatgatattacattcgtaggaattgtccagacagccaaagcgtccggtatggaaaagttcccgatcccctacgtcctgactaattgccataatacactttgtgcagtaggcggaaccattaacgaagatgaccacatgtttggcctttccgctgcaaagaaatacggcggcatctacgttccacctcatatcgcagtcattcatcagtacatgagagaaatgatggcaggctgcggaaagatgatcttaggatctgacagccatacccgttacggcgctttaggaaccatggcaatcggcgaaggcggcggcgaactggtaaaacagctgcttcgcgatacatatgatgtagcttatccgggtgtgatcgcagtttatttagacggatgtccaaaacctggtaccggtccacaggatattgcgctggccatcatccgtgcggtatttaaaaatggatatgtaaagaataaagtaatggaatttgttggacctggtattgcttctatgactaccgattacagaaatggcgtagacgtaatgactacagagaccacctgcttaacctccatctggagaacggatgaagataccagaaattacctggcaaagcatcacagagaggcagattacaagaaactggatcctgcagatgtggcttactacgatggctgtgtttatgtagacttaagtaccgtaaagccaatgatcgcccttcccttccatccaagcaatgcatttgagatcgacgaattaaaggcaaatatgaaggatatccttcatatggtagaaatggatgctgaaaaggtatccggaggaaaagcgcatttcacacttcttgataaagtagttggaaatgacctgatggtacagcagggaattatcgcaggctgtgcaggcggaaattacaccaatgtgatcgaagcagcacatgcccttcgtggaaagaactgtggctgtgatgaattttcactggctgtttatccttcttcccagccggtattctcagacctggtaaagaaaggcgctatttcagacctgatggatgcaggcgctatcatccgtaccgctttctgcggaccttgctttggcgcaggcgatacaccttgcaacaatggtttaagtatccgccacaccaccagaaacttcccgaaccgtgaaggaagcaagccaggaaacggacagatggcagcggtagcactgatggatgcccgttctattgcagcaacagcagcaaacggaggaaaacttacctctgcatgggagttagactgctggaatgatattccggaatatgactttgatgataagtcttacaagaaccgtgtatatcagggctttggtaaggcagaagaggagaaatcccttgtatatggtccaaatatcaaagattggccggagatgagcccattaacagacaatatcctcttaaaggtttgctccaagatcatggacccggtaacaactaccgatgaactgatcccatctggtgaaacttcttcctatcgttccaatccactgggactggcagagttcaccttatccagaagagatccggagtatgtaggacggaccaaagaagtagataaattagaaaaagcaagagtagctgagggcgaagaaaaagaactggcattagaaccagatcttgcaaatgtatttgcagccatcaggactatttctggaaatgaaaatgtttccgtaaaagatacagaagtaggaagtatggtatatgcagtaaagcctggtgacggttctgcaagagagcaggcagccagctgccagagagtcatcggcggacttgcaaatatctgtaaggaatatgcaaccaagagataccgctccaatgttatgaactggggcatgctgccattccagatggaagcagatcctgactttgaagtaggtgattatatctacgttccgggagtgagaaaagcgttggatggggatttaagttccattaaggcatatgtccttggaaacggaaaagatgcaaaggcagaaatcaaagagttaaatctttatattgcagatatgacaccggaagaaagagccattgttaaggccggatgccttattaattataaccggaacagacattgatcatacgcaaaagcgacagcagtaggagagcatgccgggagaggagaacaggttatgaaagatagttatcttgcacagttttatggaaaatcccagaattatacggatattccaaataaatggtataaagaatacaatgtaaagaaaggtcttcgaaatgaagacggcaccggtgtaagagtaggacttacccgtgtggcagatgttgtgggctatgacgaaactccagagggaggcatccaggctattccaggaaagctttactacagaggctatgatgtagaagacctggtaaaaggtaaaggggacagccattttggttatgaggaagtctgcttccttcttctctttggatatctgccaaagaaagcggaactggagcatttccgaaatatcttaactgactgctatgagatcccggatgaatttgtggaaatgaacctgctgcgtatgcctggcagaaacctgatgaacaagcttcaggatgcagttcttactttatacaattacgatgatgacccggataacacggatgtatatgaaaccctggtaaaaggtattaacctgatggcaaagcttccgtcgatcgcctgctatgcatatcagagcaaagttcattattacaacagagacagcttatttatccactatgcaaacccgaaatactccattgctgaaaacttcttaagtttattgagaaaagaccagaagttttctgataaagaggcaagactgttagataccattctcatgcttcatgcagatcacggcggtggtaacaactccacatttaccaatgtagtgatctcttctacaggcaccgatatctattccactgtctgcggaagtattggttccatgaagggaccgagacacggcggtgcaaatatcaaggttgcggaaatgatggatgcggttctggaagaaaccggcggatataccgcagatgataagaagatcaaaacagctgttaataagctgatggatggtgagttatatgaccgtaccggtcttgtatatggatttggccatgcagtttataccatttccgatcctcgtgcagaaatgttaagggcacgctgcttggaagtagcaaaggaaaagaagatgatgacggaatttgatttccgtcagaggtttgaacgtattgccttagagactatgaaagagcgcaagggagttgcacttcctactaatgtagattattacagcggttttgcttatgaaatgttaggtatcccgagagatctttacacaccattatttgtgtgcagccgtatggtcggctgggttgctcataacattgaaaataagctttatgatggaaggatcatgcgtcctgcaaccaagtatgtaggtgataataaagaatacacagcaatggaggagagatagagatggcagacacaattacagtatttaaaggcgatggaatcggaccagagatcacagacagcgttttaagaattttagacgctgcaggagcagatttaaactacgaagtatttaacgtaggcgctgcagaatatgaagcacatggcgagctgatcccaaaagagggctatgcttctatggaaaagacccacattttattaaagtcccctattacaactcctttaggaaagggcttccgttctttaaatgttactttaagaaagaaatatgatctttacgcaaatatccgtcctgcaaagacaaactctgctgtaaagactgcatttgaaaatgtagatatcgtaatcttccgtgaaaatacagaggatctgtatgcaggtgtggaagagatgattgataaggatacggttcactccattaagatcattaccagaagatgctgtgagcgtatcatccgcgctgctttcgactatgcagtaagccataaccgtaagaaagtgacctgcgttcataaggcaaatatcatgaaaatggcagatggaatgttccgcgatatcttctatgatatcagcaaggaatatccggatattgaagcagatgataagattgtagacaatgtggctatgcagctggttatgcatccggaaaaatttgatattatcgtaacagaaaacctgtatggtgatgttttatctgatctggtcagcggcctcattggaggtctgggacttcttccatccagcaacctgggtaaagatttcgccatgttcgaggcagttcatggcagtgcccctgatattgcaggacagggaattgcaaacccaactgcattcttatggtccgcatgtatgctgttagagcatatcggaaagaatgatgttgctgccaagatccgcaaggcagtagacctggtactggaggacggaagtgttcttacaccagatatcggcggaactgctacaaccattgaatatgagaaggcaattattgcgcatctgtaaaattaattatatgtatattcctgtccccctgcggctgcagggggatttttgcgtactagaaaaatcatgtaaaatcccggacgatcttaatatattcctgagcatgataagacagatagcttccttttctgaaggctgcaacaaaatcaacagttgtatttggggtgccaacagaaaaaagcacaggttttttcttaaaaggaatatgttttaaataggtttctgttacaaaacaggctccatatccctgggaggcaagttccgcagcagcaggaatgttaccggtctgaaggcatatttgaggatggatatggcaggatttaaacaattgatccaccgtttgacgggtcctttgatccggtggctgcaggataaaaggctcattttccaaaagcttcaggtcaagccagggatatttgcagccttctttttttatacctttattttttaaagggtggtcattgccgagtacaaggacaacttcttcatgactgatgatctgataatcaatatcagggttttttacaggcaggttaaagaatgcaagatcagcatccccatttaaaagcattccctctaaaagactggaatgtgcttctctgatctccagacgtacatggggatataaacttcggaaaataggaagtgtacagggaagcatataagttccacgcatggttggaaaagcaatttttaaaagaccggcattctgccgtataatgtctcccatctcctggtctaattcttttttcaggtttaaaatttcggtggctttcgctacataacgttccccggcatatgttaaaacaaagcggtttcctaattttttaaacaatttctgtcccatttcccgctcaagattttgaaggaatttggtgagagtcggctgtgtcacataaagcatatcggcagcttttgtaatattctgtgttttggcaatcgctattacataggacaggtctttaaaatccatagggtaccagttcctttctgggatgtattatttttctgctttttatcatatcaaaaactattgataaaaggaatagttttaatgaaaataatgaatttcaattccttgccgtgatgtggtatgctgaaatcatcaaaaggtacggtaccagaaatagcagtaaggccagctgtttaatattactgggtataaggagcattttaattatgcagggaaaagatgatcatattttgaaacttcctgtaacgcttatgagaggcggaacaagtaaaggcgtatatcttctggaagaggatcttccggaagatcataatgaatgggacaaaatattactgcgtttaatgggaagtccggatcagaaacagatcgatggtttaggtggttcccaatctgttacaagtaaagtagcaatcataaagaagtcagaccggtcagatgcagatgtagattatacatttgcccaggtgtctgtggacaaacctgtagtaagctacaaaggaaactgcggaaatatttcttcaggagtaggaccatttgctattgaaaaaggtctggtaaatgcaaaggaaggaatgactacagtcaggatctttaatacaaatacggataaagtcattgctgctgatgtaaagacagaagggggcaaggttgtataccagggagattttaagatcgcaggggtaccggtatcagcttctcctataaagttaaaatttatagatccggctggaacccttaaaaagggacttcttccaacgggaaaagcagtagatgttttagaaatacctggaatgggatccatagaagtgtccatcattgacgcagctaatccccttgtatttgtaaaggcagaggatctgggacttagcggaaaggaacttcctgaagaaataaatgcagatgaggaaaagctggaacttttggaaacagtaagaggtcttgctgctgttaagctgggactgatcagtgactataagaaatctgcatgggaaacaccgggaatccctaaaatgactttcgtagctgaggcagatgattatattacttctgatggaaaaatgataaaaaaggaagaaatcgatcttctttcccgcatgatgtctatgcagaaagcccatccaagttatgcaatgaccggtgccatgtgtacagctgcagcggcagtagtgccgggaagtatagtggaacaggttttgaaaaagggtgcagatacacagtatctgcgtattggtcatgcaggcgggacccttgaatgtggcgtggattacagagaagaaaggggcaaaacgttagtgatcgaagacacatttgggttccgcacagcaaatcttttactggatggcgtggcattagttagaatttaactagcgaaaaggatgtaccagctccatcgtgccgaactgtccgtcaaagccgggattccaacgaacttttccctgacgcaggcaggtaatagcatctgcaatattttcagatgaaacagccgtaatatcagatgtttcagcttctcttaataagaaaaattcatttccaagttcgtttaaaagtgtttcatagatccgggtcacttttacgctggaaggagagaaaccttctgcagcagcgatcagttccggcaacggggaaatgctttcaaaggggaggtgtatggcagatgtttggtcggatcctttggaaacagaaaaaggagtgtctgtcagcggttttgcagaggcagtctgcgtattggaaaacaggtcaggtgcaggcagtgccgccagatcctgtaccctgtgcaatactccggtggtaagctttttgccacataccgggcagatgccatttaatttgatggcctcttcaggtgacaggcatacaccgcattttctgtggccgtccataaaatatttcccttcctgtgggaagaattccagtgtaccggcgagtcctttgccggtctggatggcagtgtacagatttttataggacaaactgatatccagtaaggttgcttctcttccaagcttggaaggagagtgggcatctgagttggagatcagctgatagcggcttaaagatggcacgctccagttcattggcggatcagaggaaagaccggtttctacagcatggatatggggtgttaattcctcgaaacattcttccatactgttaaagccggaaaatgccccgaacacagagaaatgaggggtccagatatgagcgggaatgtacatggcatccgggcatacagaaagggtcatatctaacaggtcatggcagtccagtcctaaaatagggcgtccgtcagaatgaatatttccaattttttccagttctcctgaaagacggtctgcagcctcaagtcctggaagcagaatcaggctgtgcactttccgtgtacggccgtttttcttataaatggtgctgatctcaccgctgaccacaaaacggggatcaaaggaaccggaaggaatctcagaaaggcgcaattctggtttcagcttataaagccctggctctgccgattctaatttttcttttaactcctgccgccacaaaggatgggtaaaatcccctgttccaaggatatggatgcccttttttctggcccacagatccaggtattccggtgtgaggaacttgctggtagccatagagtaacgggaatgtatgtgaagatctgcaatgtacatgataaaaatcctcctgtttttcttgtgaacccatacattataccattgcctttcaagaggggataggttaaaataattttcgaaagtattatggggtgatgtcctctcggagtctttcatgcacctgcttttgtggccgattttccgccagctgcacccgaatttcatcaacgtacgcaccgcgtacgcctcagaaatttgagcacaactgacaaaaaatcttctcacaaaatcaggcacaaaaagattccgagagaacattgaattttacaggaggatgagaacatgacactttataataaaaagggaaaagcagctgcttatatagaaaacgatgtgatctggacctttgatggaagagccatcgcctatctgttccaggatgcagtatacaatttcccgggaaagcagttaggctggtttgaaaaaggctggcttcgtgatatgggcggatattgtgttttatttacccctcaggcatttgcaggacctgcaagaccatccatggagacaactcctgcaaagtatgcaaaaaaggccctgccatctaagggttcaagggaaatgagaaaggcaaaaatggcttaccaggctcattggagcgaaaaagagggtattgacactgatgtgtaaatatgctaaattatggtttagtgcaaatgcagtgatatggaagtagtaaacactttttaagccccacagagagccgggaaaagatgagaaccggtgactggaaagtgccgaactgatccatgagcagcttttcagaaagagatgagatcattacaggatcttcattttcagtaagaaaagacggaggccttaccgttataagaggaattgagtgcatgcgacttcgcatgaatcagagtggtaccgcgtggaaatgatatctgcgtctcttggaaacaggagacgcagtttttttatctcattacgtcacccacggcaatatttacggaggaatgaattatggcatcacagtataatcactccgccattgagaaaaaatggcgtgagaactgggaaaagaaccccatcaatgtaaatgatggaaagaaagagaaatattactgcctggatatgttcccatatccatcaggaaatggtcttcatgtaggacattggagaggctatgttatctctgatgtatggagcagatatcagctgttaaagggcaaatatgtgatccatcctatgggctgggacgcatttggtctgcctgcagaaaactacgcgattaagatgggtgtacatcctgcaaaatctacagcagctaacattgcaaatatcaaacgtcagatcaagcagatcgctgcgatctatgactgggatatggaagtaaataccacagatcctgaattctacaagtggacccagtggatcttcgttcagatgttcaagaagggtcttgcatacgagaaggaattcccaatcaactggtgcccatcctgtaagacaggtctggctaacgaggaagttgtaaatggctgctgcgagcgctgcggcactcctgttaccaagaagaacctgcgtcagtggatgttaaaaatcactgcctatgcagaaagactgttaaatgacctggataagcttgactggcctgaaaaggttaagaagatgcagactgactggatcggaaaatcttatggtgcagaggttgagttcccaatcgaaggcagagatgaaaaaatcactgtttacaccacaagacctgataccctgtatggtgcaaccttcatggtactggctccagagcacaagctggctaagagccttgctacagatgagaccagagaagaagttgagaagtacatcttcgattcttccatgcgttctaacgtagaccgtatgcaggcaaaggaaaagaccggcgtatttaccggaagctatgctatcaacccattaaatggcgcaaagacaccaatctggctgtctgactatgtattagctgattacggtaccggcgctatcatgtgcgtacctgctcatgatgacagagactttgaatttgctaagaaatttaatcttccgatcatccaggttattgccaaggatggcaaggaaattgaaaatatgaccgaagcttatacagaagcaagtggaaccatgatcaactccggcgactggaacggcatggaatcttctgtattaaagaaggaagctccacacatcatcgaggagaagggcttcggccgcaagactgtaaactacaagctgcgtgactgggtattctcccgtcagcgttactggggcgagccgatcccgatcatccactgcccgaagtgcggctgtgtaccggtaccggaagatcagcttccattaaagctgcctgaggtagaaagctatcagcctacaggaaccggtgagtcaccactggctgcaattgatgagtgggtaaataccacctgcccagtctgcggtgctccttctaagagagagaccaataccatgcctcagtgggctggttcttcctggtacttcctgcgttatgtggacaaccacaacagcgaagctctggtttccagagaaaaagcagacaagtatctgccagttgatatgtacatcggcggcgtagagcatgcagttcttcacttactgtattcccgtttctacaccaagttcctgtgcgatatcggtgtaattgactttgacgagccatttaagaagctgttcaaccagggtatgatcactggtaagaatggtatcaagatgagtaagtccaagggcaacgtagtttccccagatgatctggtaagagattacggctgcgactccttaagactttacgaactgttcgtaggaccgccagaacaggatgcagagtgggatgacagaggtattgaaggtgtatcccgtttcctgaaccgtttctggaacctggttatggacagcaaggacaaagatgtgaaagaaaccaaggaaatggttaagctgcgtcataaactggtttacgatatcgagcagagatttaaccagttcagcttaaatactgttatttccggtttcatggaatacaacaacaagttaatggatctggctaagaaggaaggcggaattgataaagaaaccttaaagaccttcgttatcctgttagctccatttgcaccacatatcggtgaagaactgtggagccagttaggcggaaccgacagcgtattccattcccagtggccggagtgcgatactgaggctatgaaggatgatgaagtagaagtagctgttcaggtaaatggcaagacccgtgcagttatcagcgtaccggctgacatctccaaggaagatgcgattgttcagggcaaggaagcagtaaaggataagatggctggaaatatcgtaaaagagatctacgttccaggaaagatcatcaacattgtttgcaagtaattagaattgttgaaataattgaaatagttcaaattgcagatacaaagaggcatcggtgtataaccggtgcctttttgctgcccaggctttcatttttgcatcagggtaagaaaaatgtaagagaaacgaagctgtaaatgtggtaagataagggatagaaaaatgaaatggtaagatgaaacagtaaaaaggaaggatcgtacataaattgaagatacagaagaaaaaatggttgacctttgcagcagcagctattattgccacgggagtattaggcatgacttccctggccgcaggaagagcagacttaaatgcaaataccgggggaccaggagagaaagcctctgtggatgtttcaaccggagaaaagccgggtgacactcaggaacgtcagcaggaccagcagacagctgtgatcacccagatccttgcagtagccggaaccggtgactgcaacgcagacatttcttattataagaaggaaaatggaaactgggaattaaagtggacagaaaaaggctatgtaggaagaaatggcattacagacaataaaaaagaaggagacggagcaactccttccggtgtgtattcctttgatctggcctttggtcttttagatgatccgggaagtgaactgccatatcataagatcgcagaaggtgatttttgggtggatgatccggccagtcctcattataaccagctggtaaatgataagactacagcaaaagactggaattcaggggaagatctgatcaaagcaactccttattataattatgctttaaatctggattataataaggaaagaacaccaggagaaggttctgctattttccttcactgttttaaagcatctggttatcagggctcctcagggtgcatctgcctgccggaaagccggatgaaggaattattaggattggtagatacgaacaccaggatcgtgatcgcaaaggatgcagagcatctgaatttaggtgagtttatgaagtaagaaatggatcaaaaaggggcgcccgcagaggtacccctttaatattatacgatattatacgatcatacaagaacacgcagatagcgcgtttgctgatctagttatccgatttctcagaactgtatttcttacagatagaagcaacaacaccgcttaaagccaacagagccagggcattaggaatgaccataagaccgttaaagaagtcggccagtgtccaaaccagatctacctttaacatagaaccaacaacgataaacacagctaccagaacagaataaggaaccattcctttcttgccgaataagtgttttacgttgatagaaccaaaaaagtgccagccaaggatggtggagaaggcaaagaacagaaggcatacggcgatgaaaatatcaccgaaggagccgaaaacagtagaaaatgcatactgggtcagcataataccgtccttgccgctgcttaaagagttagtagtaaggatactgaatacggttaaatttaatacgataaaggtatcaataaatacgctgatcatagcagcaagtccctggcagtgaggatttttcacaacggctcttgcatgtgcatgaggtgtggaacccataccggcttcattggagaaaagacctcttgcaacgccatagcggatggcttcttttacagtaacgcctgccgcgccgcctaaaacagcggatggattaaaagcacctaaaaagatctgggcaacagcagaaggcaagcgggtaatattgcaaaggataacgatcaggcttcctgcaatatatacaagtgccataaatggaaccagcttttccacaactgcagccagacggttggtgccgccgataaatacgaacagggaaacaacggccagaagaaggccaactgtaaaaggcggaatagagatattccgtgaggtaaatacctggctgaaagcagtgctgatagagttagactgtaccatattgcccataaatccaagagccaggatcaaaaagatggcgaaaataacaccaaggatcttgccaaagagtcctttaaatgcagcatgaatgtagtaaacaggaccgcctgttacttcgccgtgctttactgttttataattctgtgcaagagttgcttcggcataaatggtagccatgccaaagaacgcagacatccacatccagaagatagcgccaggaccgccgccgatcagggcagtagcagcacccgtcaggtttccggtacctacctgggctgcgatcgcagtagcaacagactggaaggaagtcatttctccttctttcttctcatgcttctttccgataccgccgaatacctgttttaagccctgcttaaattcgcggatctgaacaaatttcagacggaatgtgtaataaataccggttccgcaaagcagaaggatcagcactacattccataaaaaggtgttagcagaattgaccaatttcacaaacatgtccataattagatagtctccctttgtatgttctacgtctgtggatcgtctgattccgccctgtccttttgcctgagagattggcaggaatgttctgcatttattcctgctgtacaccttcggcgctcgtttcagatattgaaagagactctccagagtagtatatcgtcacggcatttgccgcatggggagactatagcatatataaaataaaaatgcaataattaaaaaagtataaaaaaacatacaacggaaagaagctaataatctatttatggatcccgcctgcgatcttccctgcagccagcttaagaaacggaagttttttccggtctttttccggcatatggcagcttaagatatctacaagaagggcggtttcagaatttgtaaattgcagaccttttgcatttgcttcctggcatatatgcagaaaatgaggcatgagctgggactggtcggtgtgagccgttttttctgcaaattccattaataagcttactttttcaggatccattgccataagccgcgggtcctgtttccagttattgtccataaaaactccttttttaattcatagcctgaagggcagcaatgaccatttgcaaggtttcaaaacgggtctgttgtgcgggagttaaaaaatgtctgagttgttctaaaggtgtctgtccgtctaataaagcatttactgcatcaatgagattttgttctcccgggtttccataaggttttaaagtttttaataattcttttacagaaccggttttttcaggctggtctaaggagcagatccccatagctgcagtctgaccgtcctcaaaaagctgaaatgtatttttaagttcctgtattttcacaaacatggaaagggtacgctgttggggaacatttaagaaggggagtgcagctttcatcatctgcagatggtgatctcctgtaagatagtccaggtctgtcagtttatagtctgtatgttcattgtaggaattcatatttttaccagccttattgctttggtttaaacttatgcggcaaccttttatttcatgcatatattgtagtatgaggatgtactcttaaaaggtttgggagtccattttctgaaaggaggttcattatgtatagcagactggtgatcgacgggaatgctgtatatgaaatagatgaagaatgtgtacaaaaaaagaaaaacagaggttataaggcaggaaagagaagaggagaagagcgaaaagaagaaaaaggagtttttccaaaatgaaaacaggggcgcataaacgccccgttgttttctgactttctgaggaagatcagcagaagccgccattgccgccgccacagcagcataaaagcagcaggatccagataatgtcgcatccacatccgtttccgcagccgttatttccaaaacagccgccaaatccattgccgccgccacaacagcataagatcaggatgagccagataatattgcatccatttcctccgctctggcatccgcacccgcagtcacagccgcagttagttgctgctacatcactcattttagttcctccgaaatatgtttgattacaatgctatcatatgtcaggcagcttgctcatgtttcttgtttttcgggaaaaaattaaatttaaagagaattttaaataaagataagggataaaggtggtataatgatagggcgaaaatgaaagacaagagccgcagacgcggcgttttataatcaaaggatggagaaatgacctatggatcagaaccgtttatattatgcaacaccttatgtaaaaacatttatgtgtaccgtaatttcatgtacaaaaaataaaaaaggaacctgggatacgatcttaaatcagactgctttttatccggaaggcggcggacagccaagtgatacaggtgctttaaatggtgtaaaagttttacatgtcagcgaaaagggagaggagatcatccacgaactggaggctcctttggaagaaggggttctggcagagggagtcattgactggaagaaacgttatgacaatatgcagcagcacacaggagaacatattttttccggtctggtacataaacattttggctatgacaacgtaggtttccatatgggaacagatgaagtgacggtggattttaacggtgttctcacccaggagcagttagatgagctggaagatgaagcgaaccagctgatctatgataatgtgcctgtaaaggtgttttatccttcgaaagaagaactggaagagctggattaccggagcaaaaaagaactgaccggtctggtacgcattgtagagataccaggcggagatatctgcgcctgctgtggtatccatgtggagacaaccggggaagtaggtctgatcaaactgcgtactatgatcaactataaaggaggcgtgcgtatttccatgctctgtggacgccgggcactgatggattacagggaacgtttaaaggatgagatccgtatttccaatctgctttctgcaaaactggctctggtaccggatgcagtggaaaagatgaagaatgaaagtcaggaaaaagatctggctttaggacgcctgtggcagcagcttttggaaaaaaagacggaaagctatccggaaagcacagaggtacttgctgtatttgaagagggattgtcacctgtacagcttcgccagctggctaccatgctttatgaaaagggaaaaggaaagatcgtaggagttttctccggaaatgaggatgaacaggtatatcagtatgctttaggcagcagtcaggcagatatgcgcaaattaagcaaggcaatgaacggtgctcttaatggaagaggcggcggaagcaacctgatggcgcagggaacttttaaagcggcagaaagtgcgatcagagaaacactgatgcaggaagctggaaatctggaataatagtaggaataataataaaacagctgcgggaatccagatagatgggagcctgcagctgtttttgtgccaaaacacatttgtttatgatttattcaccctgatacatatatttaatcagacgttcaatgtcttctttatcatgtgctaccaggtccagttccttgatatagccattggaaaaaatagtagccatggacaggtactgagccagtttagacttcaggttaatgcggtcgccttctggagatactaattctacggttcccttgcactggtcgatcactttgaaaaatttctctacatcagtaatattctggatcttcatggtaattcctccttctgaattacatctattatcatttgtttagttaatcttttaacgattgcattataacaaagatgagactctgatacaagggtaaaattttgtgatttttagcgaaatttttatgaaagcgcctgttttgctctttcacgtttgatatcttccagtaaaagggaagaaactctgagtccgccccgtcctgtaccaatcgaaatatccggtttgttcccgccgtggaagtcggaaccgccggttgggagcaggtgatgtctgacagccatttcctgaagtttcatgctttctaacttgttgttggaggagtggtaaacttccagtcccttcataccgaggtcggccatgtgggcgatcagttcttccgttttcttatctccgaatttgtactggaaaggatgggctaaggccacgaaagcaccattggagatcagcgtttttacaacttcttccggagagagatgctctttctgcggacaatagcggccgccgtactgaagatattttttaaatgcctggtccattccggaacagatgccttttgccactaaagcgtgggcaatatgtgcccgtgtgataatggtatcaggattatctccgcaaagttcttcctttgtaaaggagatcccgtcagcggccagattttccagcatcttttcattgcggcggtcacggctgatacgcattttttccagcatggcggcaaggaccggatcgtcagaatttacgaaaagtcctaaaatgtggatttctgttccatcgaaactactggacacctcaattccggggatcacttctatattaagatcacgtcctttttctaatgcctcaggtacaccggcagtggtgtcgtggtctgtaagggcaaaggcatccaatccggcattttttgccagttccactacctgagagggagaaaaggtaccgtcggaagcattggaatgaacgtgcaggtcaacaaaacccatggtaaaacctcctttgtttttaaactgttttttctattctttctataataataacacgattgaaatactttggtaacacttttaacaggaatgttacaaacagaaaaaaagggtaagaaatcacctgaaaaaaaatgtaaaaatcggttccattttaaataaagtatgctatactacaagctgtgattaaaaataagctaaaaaatgtaacaggtgaaaagaaatgaatgagttagaaaacaacagaagtcgaaattcctctacaggcagaagcagggccagaggtacaaatagaagcggtgcatcaggaagaagcgcttcatcttcaaggagcagttcttccagaagcagttatggaacatcttccggccgcagaagcagttcttctggttattcttcccgttcgggaggaagccattccaccagacggagcagtggatatcacagaaagaaaggcccgaattacaagatcattgccattgcaggtgtagtcctgatcgtatttatcacaggaatttcccttgctcttaagggaaaaggttccaatacagatactgcaggaacagaaacagtgatcgaaagcgaagctgagactgaaatgcaaaaagaggtccaggtggatggtatctctattacaggaatgtccaagagcgaagcaaaagcagctattttaaaggaattcccgtggagtatgacagtagaatatgagtctgaccagtatcaggtaacggatctgatggcagaaaaggtggaagcactgttagatgagatctacaaagatggcagtgatcctcaggaaagctatacactggacacatctggtctggatgagcaggtcaaggcagaggcagcagcctgcgcagcaaaatgggacaagaaggcaaagaacggttccattgacaagtttgatacagcaagcggtaaattcgtatttgcaggtgaggaaaatggttttgccattgaccaggacaagctggcatcagatatttcccaggctttaaatgataaaaagtttgatgcaacgatcactgcaaccggaagcactgtagcaccggagatctctgcatccagcgcaaaagagaaatataagaccatcagcacctttacaacgaccacaactgcgaaccagaaccgtaataccaacgtgcgtctggcagcagaggctattaatggtacagttatcaagccgggacaggaattttcttttaatggtactgtaggacagcgtaccgaagctaagggatacaaaggcgcagctgcttataataacggagaagtagtacaggagatcggtggtggtgtatgccaggtttctactactttatataatgcagtatttaaggctggtttaaagatcagctcccgccgttcccacacatttgagccaagctatgtaacaccaggccgtgacgcaactgtaagctgggatcagccggattttaagtttattaataattcaagtacagccattggtttaagagcaagttatgcagaccagaaagtaacggtagcagtttatggtatcccgatcctggaagatggagttacctgggatttagagtctaaaaaggtagaagatctgggtacaccaaatccaacctatgaggaagaccagactcttcagccaggcgcagaagtgaccaagtccaagggaagtgccggaagcagatgggaaacctataagatcgtttataagaatggaaaagaagtgtccagagaactggatcacaagaccacttataagggacatacccctgtagtccgccgtaattccagtggtgtagtattaaatccatctgagacaactacacaggcaaccaccgctccatctaccgtagatggaatgccagatggctatgttccgtctgagacaaccgcagccagcacaacggtagcaccaaatgcgacaactgcagcaaatcatacaactgcagcgccttctcattccgcagaagcaaccacagctgcaaccacagccgcttccccggcaccggtacagacaactgcagcagctaccaccacagcagcagaaaatggcggccctggagatagcggagatgtggtaatacctgtaaaaccagactagaagccagatcggaaaatagaataaaacagatcttgtggatcacaaaatcccctgtcaccggcagatgatgctgggtggcaggggatttttgcggatatgggatggaaatgttttcaacttttttgcgacaaaagaattaaaatatttttttatgaaatttgaaataatacaaaaaagttgttgacaaatggtttgaggtttgctactataatcttcgcgcttgagagagcagcaatcgtttcagatgaaacggaaaaataaattaaaaaagttgttgacaaatgaaaaacaaccggttataataaataaccgttgcagcaaacaagtctgacaacgaaatgagatccttgataattgaagattaaacagtatgtaaaaccctga

SEQ ID NO: 3591 - DNA, 1751 bp, Unknown
  gut microbiota DNA sequence
tcactcctcgtataatatcttttagatacataaatacatatattttggttaataagttactaaataaatatttgttcaataggcttagtaaagcccatgatataattgtcccagtgtcaatcaggtaatagttcttttcactcctgttgaaccagtaatggttgcttcatactaagtctgttcccctgacatggaagttagcttcaaaccggctggctgtttgcttaagttcatggataaccatctagcagtgtggtttcgcatctgtccatcttaagctggattcttatatgcgagggtgtcgatgctccatgatcatgggttttaccaagccgattgaacactttaatctacaacgaaagaaggtgattacaatgaacactctttacgtcggtatcgatgtaagcagcaaatccaatgtcgtttacttaatgcttccaaatggagataaacacagcaacttttctgttgctaactctcatgaaggttctaccctgttggtaaaaaaaatctattctgctttaacttcacattcccttgacacggttctgatcggtcttgaagcaacctcagtttacggagacaatctcgtgtacttcttaagggaagatgccactctggcaccgtttaacagaaagattcatgtcctcaatcctaagcaagtcaagaagtttcacgatacttacaatgacttgccaaagaatgattatgtggactcttttgttattgctgactgcctgcgtttcggtagaatcaacaaagaggtatatatgggagactaccgttataaagctctccaaaacctcacacgggcacgtttcttcgctgttcagaatcttgtcaaagaaaagcagcgattcatgaatgtgctgttcaagaagtattctactatgacgcaggagaaggtattcagcgatgccttcagcactactgcccttgctgtctacgatgaatttgaatccgcagaagcactggcaaatatggacttacatgagcttactgacttcatcattgaaaaaggaaagaatcgctttcctgatcctgttgcagtagccaaagccattcagaaagctgcccgcagttcttaccgtttacccaagacggtaaatgactctgttaatcaggtgctttcaatatccataacctctatgaaggcattggaatctcaaatcaaagagttcgataaagctatcaaagccctgatggaactcttgccaaatgtattgatatccattccaggtattgggcctgtatattcagccggtatcatggctgaaatcggagatatcaatcgttttgataatcaggcatcgcttgctaaatatgcggggcttgcctggaaacaacaccagtccggtggatttgaagccgaagttacaaggctcattccatcaggcaaccgatttttaaagtattatctgtgtgaagccgcattttctcttgtaagatgcgacaaggaatacagcgacttctaccacctcaaatacaaagaggtaaacagatgccaacacaaacgtgcactcgcattaactgcccgtaaatttgtgcgtttagtctttcgactgctgaaagacaaccgcctatactgtccagcaaagtagattccatctgcttgctgatgaactacgccctgctcatttaaaaaatctggtcgacagggcttaggtgggtgttttttgtctttgcggtatatatcaaaaatgtatgatttttaaatcatttattttcttgacatcacaccgctggactta

SEQ ID NO: 3592 - DNA, 1845 bp, Unknown
  gut microbiota DNA sequence
gactccgcatgaaatgtacagcaatcctgaaaataattcaaaacacccggtaatgtcagtttgccgttctcacctgtctcactgtatctgactctgctgttaaaactgtaattcattttttatgtccccttttcttatgtcgctatgattttttaatatacttcttttctattattataacaagccaaaaatataaggcataaaacagtttttataaactggcctatgccttatctttgttctacgttatattatttactgtaattctttgctacaaatgtgatcatcaccttaaacagatccccatccaggtatagcttaaactcacctccctgcagctctgtcagactctttgcgatagagagtcccagtccgcttccttctgtatttctcgccacatctcctctgataaatcgttctgtcagttcatccgcagagatattcaaaggctgtgctgaaatgtttttcagggaaaaggttacttttttatttctgttgctgatctctgcataaactctggtgccttccattgcgtacttcacaacattgccgaatacattttccagaacacgccacattctctgaccgtctgcgtagataatggacggttcgtctgtgaaatgtaccatcatagtcaggttcttctcctggaatttctcttcaaattctccgatcacctgctgcaccatttctacaaaatcaatatcattcatctccagcttgatgtttccggtgcttgccttggatgcctctaccacatcctctgtgagcaccttcagtctctgagatttctcatccaggatgcgtaaatattcctgtattttcggatctgtcggattttcccgtttcatcagatctacataattgataatggaagtcagaggtgttttcaggtcatgggaaacatttgtgatcagctctgtctgcatcctttcttttttcaggctgttctccacagcagcatccagaccactgccaatattgttgatatattctgccatcaccttctgttttccggtaagtgtatctgttttgatcttatattgcagttctccatcgcttatttttttcagaccatccataataagatccagtccgtctgcttttctgatggcgaaaatcataacagccacatctacagccatcaatgccagcaggaatactcctgcaccactgaatacgcagccgatgatcaggaactgcaaaaataaaaatgcacctcccacaagcagaacttttattttttctgctgtatttctggaaaaagctctggcaaaatcggcaagcttcccactgcattttccaatccatttcagaacttttctaatcagactgtttttccataaggttcctgcctttattcttcttaccaggctgagatatccgatcagaaaccatgccattgtataagtcccacatatgagacagataacaatcactgtcactactacatgactgtaacccaatgatgagttggcgatcaaggttcccgatatgatcgttcctgccagccatataccgattactgttcctgccgcaatttctgtataccatctgtcaaatccattcagatgtatttcttcatcctctggtctccttcctgctgtcacagtcagccacaccataccgatcagccagagcacacttccgaagattgctcctgccagcatcggaaacataagctttgaatatgtctcatagttctctgcctcatcagccatggaatctgccacagaaaatttcgtatcaaccgaaactgcaaatacaaaatcctttgtgtcaaagctctgatcaatggtatgattccacacctgcagatctgcacccggaatatttgtaacacac

SEQ ID NO: 3593 - DNA, 448 bp, Unknown
  gut microbiota DNA sequence
gttgcctgcggagaccgcggcgtatccatggtattccagaactacgcccttttcccgcatatgactgtaaaaaataacatcatctacggtctgaaagcccacaaaatggaagcggctgagattaaccgccgcctggaggaagtactggaaatgctgcagctgaaaggtctggaggaccgcaagccgaaggatctttccggtggacagcgccagcgtgttgccctggcccgcgccgtcgtaaaacgctctgactactttcttctggatgaaccgctttccaacctggatgcacagctccgcctgcgtgcgcgaaaagaactggtcaagatccacgagatgtaccgtccgaccatggtttatgtcactcatgaccagattgaggccatgaccgtgggacagcgtgttgccatcatgtatcgcggaaatatggaaatgctggacacgccaa

SEQ ID NO: 3594 - DNA, 546 bp, Unknown
  gut microbiota DNA sequence
tggatgctgtacagaatatcaaggtcagcttaatgggacctttagctggtatcggtgataccttattctggacactgcttcctactatcatgggctccattgcaggatatatggctctggaaggcaaccctatcggtgttatcctgtggctcattgtaaaccttatcttcatctgcatccgtacccagttaatgtggattggataccgtgaaggtaccaaactgatcaccaaagtgggcagtaagcttgcccgcatcacagatgctgcttctgttctgggtcttactgttgtaggtgctctgtccgcaactgttgtaactgcaaaaacacctctggcattccagatgggtgaagttaatctggcagttgcagatctgttagacaagatcatgccttctatgatctctgtagctactgtcctggtactgtataagctccttggaaagaagggcatgaagatcactaccctgatcctcattgttatcatcttctccatgatctgctctgcactgggaatcctggcttgatcatttataactaacataa

SEQ ID NO: 3595 - DNA, 6149 bp, Unknown
  gut microbiota DNA sequence
aagcgcgatggtgattgccctgtcaggtatgtaataccagccgccacccagccaactttcgccagtaaaaaagagaacagtaagtacaccaatcatgccgactgtgagcagcaatatatggatgcattttttccttaccaagtttaatctgaagactccgggacgtgaggatgacgatgcagatgagaccaaggtaactctgtccaataacaacttcacggaagtagcgaagatcgttctggaaggcgttggcggtccggagaatgtggcttctattgataactgcattaccagactccgtcttgaggtcaaggattataccaaggtcaatgaaaagctgatcaagtccgccggtgtggctggcgtgatgcgtccaagcaagacctccgtacaggtcatcattggaacccaggtacagtttgttgcagatgaattcaagaaactctgcaaataagtacgacctccctggtttcatgctatagacatacgaaaggggctgttgctccatagatgagtgattatctatggaaccgcagccccttttgctgtatgaaagcggaagctgcagcgctatcatctattgatgattttgcgacagctttttcttccttatattaatgaaggagtattttaccgcttattccagtgtgccagttactgattgcgggatggcgaattccaccgcgcccatgtaagcgggggcaacatccgtttcatcaaaggtgatcacaagttcgcctttttcattgaaataaaagctttcatcgcctcgtaattctttaaaatcccattctggcatatcgctgttgtaaaaataggtgacagaggaatcggcggccatttgtgcctgcatctgttcctttatattgtcgctgatcgcagtgagcatttctggcttgttgcggaaaagatcagacaaagaaatcattttgccggtgcgtttatcaatggtgaaaactttggtatattcggttccactggccattaccagagtggtatcaattcgcaggcagagatagttgggggtatccgttaccacctgataggaagaagtgagcgagtaattgccctctccctgggatgagcgcaggtcgctttcatactgtgcgattaaggcattggcatattcttcgatgctctggttgacctctgccggtgcagactctatttctgggacatccactttagcttcaaagtgattggtctggtcttcgtaagtccggaaggtgacgattttggagattgggccaaggatagggacattttccatggcatttgcaatggtagggtttatgtttgtgaggattaccagcgcggccatggctgccacagcagttgcaccggtgttccgtaaaatataaataatatgtgatttctttttccgttcgcctgattttgtggaatgtgactggacagcggttgctgccttgccctgtgcaattccagctaaaatacgttctttggcatgtggagaaacggggatctgttcatattcctgctttaattcatcaatagtgtgattgctttctttcatagtaagaactcctttccgaattagttggtgtcaggtgcttccaggttgatacgcagcttttttaaagaacggtaaagcctggtttttacagtactcagattttcatttacagccagtgcaatatcttccagtttcatatcttcgcaataccgtaggacgacgatggtacggttttgaggttccaggctctctagggcattttttaaatctgtttcctggtaaacatcttccgatgcctgttctggaagctctccaggcagatcttctttttttctgcttcttaaaagatccatggtggtatttactacaatcctgcagatccaggaataaagtttggagggatcttttaaggagttgcactggcatatcgctttgcaggcgctttcctgaacaatatccagggcatcatcttcattgtaaacatagctgtaagctaaccggtatagccggtcatatttttcaatcaggacctgttcggtctgtacggtaattgaatccagcgcgctagaatggatcattacatattttcctttctttttgttttcatatattagacggataaagagaagaaaaagttgcaaggaaattataacttaatctatatttttcgcgcaatggcttcgtatatgtatgggatatgccaggaatggtatcctgcagtgagaaatgttccttgttaattagcccgggcaatgttataatcaaaacaagattatttctttcgatgatagtggcctctggccatggatgagatctttcatggatcattgaaaaggggtagtctatttttttagtcaatgcatgagtgtgcattggctttttttattttatagacgaaccaggaaaggagagaaactatgtccgaggttacacggatgtatgaactgctctatgaagagcgatgggatgaaaaaaagcaaaaggaacgacggaatgaagcggcatttttttcaccggagagtccgatcaccagagaaattccaatcgaagaattgtttgatgttcttgatgccggagtatgggcatatcagacgcggtacaattcggaggcactggtgcatagcttttttgaacagatcaagcgctgttctgtagtgaaacgacggagaatgctgtaagaggagggagaaagtgagcaatattgtaaaatgggcagcagtcagtgatgaggaaactttcgcaaaagttcgagtggaattttccttcggtgacggaagtgctgttcaaaaaacagttacgatggccgatttcatcagagccatgagcacgattgaagcagagcaggagagatgccttgaaattggacagataccaaatggattttatgacggggtactgatccagaataaggaacagagttttgatgtgatcatcacggtttcggcacatctgggggttatttatctgtttggagtgccaaagcaggttgtgtttccggatctggcatttctgtttaaggtaagagaggggatggtatccgcctctttttgttttgccttaaagtgggatgaatccgggatgatcgggccggccagcaggttatgttattacccatttggaaatgtatatgataatgggaaaatatgttggggaaatacggtatttccgaaaatgacttcgatcaaagatgcggagaagctgatccaggcattttttgatgcagaaaccaataatgatttgtaccagaaccggatcgcggagcatccggaatttaaagaacagtccggtcttttggaaacacttaaggaaatggaagtgttcccgcagaaatggctgaaggaaaatggaaatcaattaagcaatttatgtgttgcgataagaggaggaaaataggttatgcagatgagtttttttgattttgaggaatttaatgagctgaaggctgaggcaaagaagaaagaggcaccgagaaagaagaaggaagaaaagcagaagaaaaaatctgcgccgaaaacggtttacaagctgccccttacgttaaagagtattgctggtgatctggtgatgacggagggaacgggaacagaggaagaagtgaagcagtttctggcagagcagggcccattctttgcaatctgtgatgtttcaaagaaagaggatgcatatttgtgccgcccaaagaaccatgaaggagtggaaaaaggaaccatcacggttgacggaatgcaggtgttctttggggcagaagcagtggatgttacggcattaacaggtgaggtggatcttacaaatctgtttgagtatgtgttaaagagcaaggggcttagcggattaaagcttactttgtttaaaaacgaaaacaatgttgtgctccttccggcagaatcttctgcaatcaccgtaccatttgaagatacagaagagatcagggtgctgaaggcaggagaagagcttaccattggaatcagcgaagaagcagagacacttgaagaacagctcaaggaacttgagggttatggatccttatatgatctgtacccgtgtggcgaaaaatactatcttggcccgaagtatgctggtgtatccagtgccagtacggttaaagtgaccaagtatgccattgacggagttaagttatccctgatgtttacctcatatgacttatcttcagaggattttggcggtaaaaagtccgtcacggaagaggatctgctgaatttcctggatgcaaaaggacatctggaataccggctggcaggtgcagtatttacctggctcggaaaagataagaacattctgtatgtgggaacaaagggcagcaaaaaaggtgcggatgataaggaaacattggataaaatgcagctttctatcggaagacagcgggtgatgcatcagggagaaatctatgatattctgaaccatccatgcttttactgcggaagctcattggaaagtgaccagaaactctttatttggaaacttgaaaaagtggatatttcttattggttagctatatcacggtttttttgcgaaaactgtgacagcgaagtagctgtgcatcttttttatgaccccaaaagaaagagctttaagtggtttgtgccctttcagcaggtatatcatgcatccgttgaagcagaacgggagccttatttagagtgttatgaagtttcaggattggtaaaggttggagaatttcattcccatggcaggatcccggcctttttctctgccacagatgatgaggatgaaacatttcctggactttacggcgtggtatcctgcggcgatgacaggaaagtttatcgtgccgtactaggggcagataaacagatttttctcacagaagaacagatgaaaaccgttgtgtatgattccgatgaggatcggctgtcctgggttttgggctggtttcatcaggtctacaacaagagcatcggaaatggaagccactatattgtgctggtggggcaggaaaagacaaaggccatttatgttccatcgtatgaaatggcacgattttttgaaggtattttccatgtatattccattggccgcggcctgcgaaaagattactgtccgcaggatcatcattttctgatctcagcagaggagcttacctggagaaaaggagatcctttgctgtgtggatgtggttatgctgatcagttggtcgcattattataatcggagaggtatgtttatgatagaaaaattggaggagtatggccggtttctgtttggctgggcattccgggcgatgcagagcgaaatgacaatgcaggaatccctgaatgcaaagtcagagagagcctatcttacaggaacagaaatcgcactgttagaggatagcagtctttttatcattgggattggtattctggtgcttatggaagcattttttgttgtggtagttatatccttattgctgcatggtgtgatggagctgattatacggtgcctggtcgaggggtatagctttcttacaagggaaaagagatcccggcagcgtgcagcggccaggaggatccagaagcgccaggaagcgcttcttttacaatacgttctggagtctgaagaaaggacaaaagagatgccggatgtgttaaaactgccagaatttatggtaaacagggaaaggagaaacaaacatgcgtattaatctgcatgtaattgtgataggagctggcttgaccggctccttctttttaaaggaaatgattgcgtatcttcatatgaaacaggaaaatttgatccggacggatattacggtttttgatcctggttcaatcggtaaagaggaccttggcgcggtatatatccgggaagatcttggccagaacagggcacttttattatcagaacttttgaaagaacagtatgactatgaggtgacggctgttccgggagatttttctgtaggcagtccggtattacagatttccaaacgggattatgtttttatggttgattgcagcgatgggagcattcctggagactaccgaacggaatggaaaaaactgtctgcgaaaagaaagctgtatctgaaatttgcagatgcaaagctgtatttggatgacggaagcggaacggaaccatttttttcaaatacggaagagaaaagcgaagattttgtctggaagcatttggaaagaatgtttttggtgaaccttgc

SEQ ID NO: 3596 - DNA, 1558 bp, Unknown
  gut microbiota DNA sequence
atctattcttaccataggtattctatcccacatggcatttgcttctgtctgttctatcacggtaattttataaacctctcctaattgtgcaggatatgattccattatttctccgttatagctaatttctacgaaatctccaatttgcaattcaaggttctcttcgtttgatatataaaacttatctgctgaatcaagttccaaagaaccatctaccggttttactattattgaatcatgattcgtttcaattaccgatgcctgaaatgttaccattagcggtctattatctgccgaagcaagcatttcagttatacaattacctaaagcaggcgttggtttataaattccttgatatggctgttctacatattcgattcctttatctacatagtaaaaaagagtagttcctgccgccccatcacaatttatattgatcgtaatagaatctttgttgaccggtgcatcattgattgattgctgactggttgtttccatatccattagcatagataaaaattcatcaataaactccgtagcttcaccttctgtgttaggtgacatagcatatttgtcaccgtcagagacaccaatcgatacaatatcctctctggctggcaatctaataggattcccctgttcttttcttccacatgcacataacataattgaaacaaagtagcaaagacaaacaatactgcataatttctttttcatggtcataatcctccccaaaatatatttcgtattatacgttatctaagtgtatatttcaatgtgtgggaaatagccggaacgtgtttttatgcattgtgaatgcatgtttataggctcgttttcagtgggtacacaattccgaaaagggagttccttttcatcaaagtacaccgtctgattattgcccgggtattcttcccctttttgatttttcaaagagctttctatctccaaatccccgcttatgagaggatactccagccccttcttctcaatatattctgacattatctgcaatgcgctttttaagctgcagccctttttacatataattttcattccatttcaccttctaaatggcaccgaccactttcatctcaaaagcattataccgcttaaaaaaattatcacaagttgccttatggtaagcgaagcgggtttactattagacagaaccactctcctgagatataatatccttaagatttcaaaaggggagttttatgaattcagaaaaatatatgagccatgccgttgtatcacttatttcggccaaagggggagttggaacctccacattaaccaaagaactggcgattgcatttagtaaagacgtttccgtctgtctggttgatatggccctctcctgccctgcccaggaaacacttttccgcatacttccaacacgtacaatggaatatctgtttaagcacaatgcgggggatctttcccctctgtactggcaggatctggaaccctatcttacgcctgtccccggtcggaatatccatcttttatccgccaaacaggtgaaaggagcataccatctgcctctcaatcg

SEQ ID NO: 3597 - DNA, 426 bp, Unknown
  gut microbiota DNA sequence
aagcatatgatgtctggaaagaaaagaaaaactatggaaaagtatctatgggcgtagtgagaactacatatcttatcgatgagcagggaattatcatcaaagccaatgataaagtcaaagcagcagatgatcctgaaaagatgcttaaggaattagagtgatgaagattatattatcacctgcaaagaagatgattgcagatactgataacttagcaccggttgaactgcctgtctatattgataagacagcagaagtattaaactggatgaaaagcaaatcaaaagaagaactgaaagctatctggaaatgtaatgacaagattgcagagcagaactttaacagattggaaaatatggatctttataacaggcttactccggctgttttagcatatgaagggattgcatttcaatatatggcacc

SEQ ID NO: 3598 - DNA, 3377 bp, Unknown
  gut microbiota DNA sequence
gccatataagccgccgtatacgattttcgatttagaggagcggttcgcaaaaaagggaagacagcggggactctgggaagtataaggatcttgcggagcagagtcttggtatagcagaatgctaaatgtgtgaaataatacctatgagcggttgatcgaaaaggtcagccgctttttttgcctgaaaatcccatattgacatctgggaatgaaatgcttaaaatgaaaatagaacaaatgttcgatttaaaggagcggatatgaaaaaagttatttttcatgtagatgtgaattccgcctttttatcctgggaggcgtgttacaggatccatcatctggggggaaagcaggatttgcgacagctggtgagtgccgtgggaggagatcaggagaaaagacatgggatcattttggcaaaatctattccggcaaagaaatatcatattcagaccggggaaacggttgtttctgcaaaggaaaaatgtccggacctggttctggtgccgcccaattatgatctctataaccgatcttcaaaagctctgataaaactgttaagtgagtatacggacaagatcgagcaatatagtatagatgaggcttttttggatatgaccggctgctgccaggatccgataacgactgcgtatgaaataaaaaatcgtgtgcatgcagaattagggttcactgtaaatattggtgtttccgaaaataagcttctggcaaaaatggcttcagattttacgaagccggatcacgttcatacgctctggaaatcagaaatgtcagaaaaaatgtggcatcttccggtgggtgatctgttttatgtgggccatgcctctttatacaagttgaaaaaattgggatttcatacgattggagaactggcagctatggatcctgcaattttgcgcgcgcatatgaagtcacagggaatacttatttggcaatatgcaaatggtatagatgaatctgcagtgatcagctcacctccgccggccaaaggctatggaaattctctcaccacgccttatgatgttatggattgtgaaactgccaggcagtatcttttatcgttatcggaaaccatttcagccaggttaagggcagatggagtaaagattagcgttgtttctatcagtctaaaagactgggatctgcgtttttacggacatcaaattacactatctgttccaacggatctgaccctggaaatttatgctgcagcctgtcggtgtttatctgaattgtggaatgggattccgctgcggcatctcgggatccataccagccgtgtatcatcagatccctttcgccagatgcaattttttgaaacgatcgactatgaaaaataccggaagatggagaaaactgtggatcagatacggaaaaggtttggaatggatagcataaaaagggcatgctttttgccatctgcaggatctgtagaaatagaccatatgggtggaggcgtcagccgggaaaagcggacggttgattattcccaggagaaaatattataatataaggggttgatgaacgtgaccagatttgcgcaagcaacaaaatatggaatagatgtagatagcgggatccctaaaggaaacatgtaccatatcgcctgttcggcatggtttacatcaactggccagactatgccaagatattttaagtttgaggatgatgccggggaggttcaaacagtaaaggacatcctagtgaaatatacggaagaaaagaattattctggcataccgagccgtgaatatggatgcgaagccgtaattggtgggttgattcgggaatttaaactgatatttttcctggaggcttgtaaatgggtgatgctggtgtgaggagcagcttatgtgtggaagatattttatagatgatgaaatgtggcgggaaatcaggaaaatctgcaaacagattgatgatgcaaaattgaaagtgacagtgggagatgtgcgtcctaccgatatggccatggttctgactggaatgaagaatgtgcatctggaggcaatgcggtggggatttacaagtaagtatcaagactggctgcttattaatgccagggccgagagtattttatcgaagcctgcatttcggaacagcgtgcggaattgccggtgtgtaattcctgcagctggtttttatgaatggaataaagaaaaagaaaaaatctcttttaccatgccgcagtcagatattctttacatggccggtgtctggcagccaacagaaaaagaaagccagtttacgatcataacaactgttcctaacagctctgtatcatcggtacatgaccggatgccactggtactgacaccagaggaaatacagccatggatccaggactggagcacggcagaaagacttctgacgaagacacctccgcttttggagcagaggcaggaattcgagcagttgtctatatttgatatgcagtaaggggatttccgaggaggattctccgctcacgggcccattatcttttttgcgcttttaccaacagcatcatgggacggcgtagttcatccttcatgcctggaatatccagcatatctggggacggcatagcttcttccacagcctgtagtgtaaagccattatgtagcaatcccatcaaaatctgcgttaaagtatggtgttgtttcacaacatcgtaatctaaaaaatttgtgtgccgttctccgggcggataatagttatcgaccggccagaactgtgctgtgccatcatcggaataaatcaaatcctgatttattccggcagtgaaaaccggatgtttaattacttcagtatctgatagctcatcataaaaagaataaccatcaggcctaaaaatatcttgaccaatttctgatatatcgttgttgctggatttatgagtgggttccatgtttcctttgcgtccggtatattgttcctattttctccagttactttctgggcatagagacggtttgacgcataagagagcatttccttggctgcttcggcctcatgctctgatacttcaaaggttctgccatctgcgaaagagagcattttccatttgcctgctttctttttcggggagatccatccgctgatgtctgtgagaagtggaagatagtaaacaccggcggcgtcctgttcatcaatgataaaatgataagtgaccgtgaacgatctgtttctggaaaccggctgcatgagaaaatattccgtgcagaaaagctctctgatctgcttgcgctgtccccatgaataaaagtatgaaagtgtccgcatgactggaccaatgacgataagaacgacaaacactgcgcctgtcagcagcataaaggctgcgtatatcataatcgacgagtaatcgctgaaaggcgatg

SEQ ID NO: 3599 - DNA, 983 bp, Unknown
  gut microbiota DNA sequence
gaagcccattggctttagacaatgggtagttcacatatgccgcaatgagaaaattgattttatccttgcgatcggtggcggaagtgctattgacactgcgaaagcaatcggtgttggtgtcccttatgagggagatgtctgggatttttatcttggtaaagataccccaaagaaaaccctaaaaacagccgtaatttgtactataccggcagctggaagtgaatcaagtttaagctctgttattacaaatgaagatggatggtataaaaagagtattaatctggacctgatccgcccggtatttgccattataaatcctgaacttacatttacattgcctgcataccagatcggctgtggagttgtagatatgatgacccatattatggaacgctattttaccaacacaacacatgtggatctgacagatcggttatgtgaagcagcacttcgcagtattattgccaatggagagaaaactttaaaagagccggaaaattatgacacaagagccgaaattgtctgggcaggaactctcgctcataatggattattaaatacaggaagagtacaggattgggcgtcccatcgtatcgcgctggaaatgagcggactttacgatattgctcatggagcaagtctttctattgtatatcctgcatggatggaatatgtttacagtcatgataaaaaacgctttatgcagtttgcagtaagagtatgggatgtagatctggcatatggagaagaagatgaaatatgtctggaaggtatcagacgtatgagagaattctttaaaaaactgggaatgcctttgacgtttgaagatgccggattaccgacagatgcgtttgaagaaatggccgataaggcaacttatggggatacgattccagtaggtaattttgtaaagatcggaaagtctcagatgattgatatttataaactgttgtaagttatcgaataacctgcaataatgggaa

SEQ ID NO: 3600 - DNA, 4376 bp, Unknown
  gut microbiota DNA sequence
cccgtgaatagggacttttttaggcttatagatcctttttatcccttaaaattttaatgggaaccagaattcacattgaaaaacgaaaaatcatagaaatgcctgaaaatggagggaagaaagctcaataaaaagcgggggtttaaagccttttaaaattttaaaaattaaaatgcggaaacgggagaaagtattgataattcaagggtttcggcatttgaaaggttttaaaagaccgtttaaaacaataaaatttaaaagcaattataaaagtgaaaaatgagaacttaatgggaaccagttaatgggaaccaaaaaagagccggtcagttaattgacgcggcccttttttattgctggtaggcagtccagcaaggtggtaaatgcactaagaatatatcataatatgaaaaaatggtcaatgatactcaaatgaggattatcaatcctcagacaaagatttcagataaaattcagcagcttttcccagaacaatatttttttccacttcagaaagtgaagaaaagtatttcaggagttgctgagtagatgtgtcattaagttcaagatctgcctgattgcattcatctttcccggtaagcaaaaagtcagatgtgatcccaaagtatgctgcgatagtaggaatcagcgatgctggcggatcagtttttctatttttccaaccgctgacggtttgcttcggaatgcccgttgcttcgcaaaaatctttctgggaaacctttttctcatctaataatttaaaaaagcgctcatttatagtcatagcccctccaataatcctcacatgaatatataaaatcctcgattttaattgacaaatcctcaaatgaggattattataataatgtatcaatcatacaagaccgattatagcacagaatccgataacggaataggttattttgtatcgctgatacagaattttataacggaatacgttaggagggcaggcagaatgaagaacagaaaagtgcgaaatttcgctgagtttgccttatggacaaaaaccaggatgctggaaaaaggcatcagccagagagaactggccgcaggaatgggaacacaccaggccaggatcagcgaggctatcacagggaagccatcaggaaagaagtttatcattccgctgatccaggaactgggcggaaacatggatgattttaaagactttttaaataccgtttaaaagagtcgaaaccggcagaggccggtcatgcagggatagcctcctgcatctgatgaggacaggctgaaaaggtggtggaaatgtatggcgcagatgctgacagcgaagcaggttgcagaggtaaaaggctgcagtccacgttatattaagaaaattatacaagatgggaaattaaaggcggtagagactgttaatagcaaaaatcgaaaaacttacctggtaccgctggatgcgttggatgaggatctgcagcacaagtattatcaactgattgcagaaaatcctccggaagaaatagagcagccagagccggaagtagagaaagttgcgattgatgagtttaccgaggatgaacgaaaggaaattgatttctggatcgacctcaccaagcgctggcagtcatatagaaaaatgccgggggttacttccctggctgaagtagataaaaagttcgtaacgctctgcagcctggaatatccagagcggagcatatcagtagatacgctttacagaaaatggaatgccgtgaaggctgatgatatgaaggcgctggttgataagcggaacaaatggaagaaagggacaagctccatagatgaaacgatatggcaggctttcctgtactactatctggatgaagcccagcatccggtaaccaagtgcctggagtacacaaagatgtgggcgcaggaaaagcgtccggatctgtatacgcagattccggcctatccttctttttaccggagactgaaaagtgttccggagggagtaaaggttctgggccgtgaaggtcacaaggcattcaatgaccgctgcgctccatacatcaaacgtatttatgatgagatgcagagcaatgagtggtggatcgctgataaccacaccttcgatgtaatggtgagggataagtcaggcaagctgcacaggccatacctgacagccttcctggatgcaagaagcggaatctttacagggtactacattacatataacccaggttcagaggcaacgctgatcgcgctccggaagggaatcctggaatatggaatcccggataacatctacgtggataacggtcgagagttcctgaccttcgatattggcggccttggccaccggaagaagaagccgaagaatggcgaggaaacctttgaaccgccgggtgtattcaaacgcctgggaatcaatatgacaaatgctatcgtccgaaatgcgaaggcgaagatcattgagcgccggttcaatgatgtgaagaacggtctttccagactgttcaatacttacacgggcggcagcgtggtggaaaagccagagcgtttgaaatatgttctgaagaaagatgccatttatacagacgatgagttccaggagtatgtggatgcaattctgaagtattacttcaacatgatggaatacgatggcccggtggcagaagataaaggaaagctcaaaatggatgtgtttaatgagcatctgattaagcgccgggtggcagccgcagaggaattgaacttgatgctcatgagaagcagccgtccgcaggccgtgggccgccggggagtgcatctggatatcaacggaggccgactggaatattggaacgatgaactgttgatgaaacatttcggtgagaaggtatacttccggtacaatccgaatgacctgaaggaagtccgaatctacaacctggaagacaaatatctgatgacggttccggtagataatacggcggttcttacatatggcgctaccaaggatgatgtgaaggccggaatggcagtgaccaggaagctggagaagatcgcgaatgaatataaaaagaacgtggtcatcgcagaagccgaccgagttaccgcgctggatctggtacttcgccaggcacaacgcaacaaagaaagctacacaggcaaagcagacccgaaggtactggaggttcagcgggcagatgaaacaccggtatatcagaaagtggtcggcggagtcgatcttgacacaatgattgaaaatgcagccaaaaggcagggaggtaaatgatgggaaaacagtataatacagaacttcaggcgaaagttgaagcgtacatgaaggaaacgggaatcagccaggcaaagctggccccgatgatgaacctgagcggagcggtattaagccagtaccgccgcagcgtttatgacaagggtgatgtagaggatgtagagcgtaagatccgcgagttcttccagatcaaggaggagcaggctgaaaacgccaagaagaccgagtctttcaatgcagtacggggatatgtggcaacctctatttcggagagcatttacaagatgatccgttactgccagcttgaaaaggggatcgtagttattgacggagatgccggaatcggaaagaccaaggcagccaccaagttcctgcgggacaacccagcaacggcaatctatatcagcaccacaccgagcaccagctctgtaagaagccttttaaggatgattgcaagagcgttgaagatttcggaaaaccagagaacagaagacctttccatttcaatccgtgaacggctgagaagttctgataatgtcctgattattgacgaagcccagaacctgaagttcatggccctggaagaaatcagaggatgggtggatgaagacccgatcactggaaagcctggcattggaatcgcactgatcggaaacgatgaggtctacaacaagatgcttggaagacaggaggcaatcttctcacagcagtttaaccggacgaagctccacgggcggtaccgggctacgaatgtaactaaagaagatgttgagaagttattcccatccctggtggagaaaggaatgacgccggagctgacatacctctacaatgtcggccacagcaagtggggagtgcgcggcatggtaaacgtattcacagcagccgccaataaccaggatgtttccctggaaggtctgcagaaggtaacaggcccgctgggaatttatttataaaatcaatcaaacggaggtaaatgcaatgaagtacatgacaggaaaagcaaaaatgatggtgacagggattgcgcttggaacggtggccgccgggggaatggcggcgctgatcgcagcgggcaaggtcggagtgatcggaagcctggttgtggtattcctgatggctctggcgggagtta

SEQ ID NO: 3601 - DNA, 2227 bp, Unknown
  gut microbiota DNA sequence
caatgaaggttcagacaatgtccgcgctctatataccttcaaggaagaacttgagcagagtgaggatcagcaggccaaggaagtgctggtggatgtatatgacctgctggactttaagaaggacgcctacgaactgctctgccaaatcggaaatcgttccgataaaaagaccctcaagcggctgggcacgctgaaggactatgcggaaaactggggcaatcattatgctctccccaagcccaaaacgccggaggaaaagcagaaagagaaggaacggcaggcccagctgggcctgcccgccttccggtatcacccaaaccctctggaaactggggcttttgaggaatccgcagacggcgttgtctgcgactgctgtggcaagacgacccatattttctatacagcccccttttacgccgtggaggatattgcatatctgtgcccagagtgcatcgccaacggcgaagcagcccggaaatatgacggtagttttcaagatgatttctctgtggatgatggtgtagacgatccggagaagctggacgagctgatccaccgcacccccggctactccggctggcagcaggaatactggcgcgcccactgcggcgactactgcgcctacctgggccatgtgggtgccagagaactgcgggccctgggtgtgctggaggaggtactggacgatccgatgtgggacgatgagcaaaaagaaatgatccgggaatctgtcaatggcgggcatctgcaatgctatctgttccagtgcctccactgcggaaaacacctggtctggatggattttgattgaaaaggagacattactatgggacttgacatctacgccgggacgctgacccggtactattctcacaactggaaaactgttgtgcagcagtgggcggaggaaaacggatactctttcaaccgcatcaccccggacggggaacctgctgataacgaggaagaaatgtccccggctgaggtccaggcggcggtggagaactggcgggatcagatcttgagcgccatttctcagccgggccagcccccctacgctccctggcttgaagataatgagaaaccttattacaccgacaagccggattgggatgccttcggcgctatgctgctggtggccgcctgtcatacatacgaggaaccggtgccttccaccgtggagaaggactggatcttcggggagcatcctctggtcgcccgccttgcatcagatgaggagcgggtgtggtccctgtttcgtggggctacctggtggctccctctttctgacagctttctgttccaagggtccttgcctaccgatgacaccgccgctatcgccaccttgggcggactgcggaaggagctggaaaagctgaaccagctggcgtggcaggccgatgaggacactatccttggctgggcagacacggagggatacccggtagacggaaccgtagactcagatggacagtacagcaaggcagacatcccggaacacacccagtatgacactcaatcccttgccaagtttgccttctccatgttctggcgggccatgcggtttgccgaggaacagcaggtgcctatcctgcttgattattaaggaggaaaccaaatgagcaataaagctttccagcaaaatctggacgacaaaaaaggcccccagcccggaggtccctatctcattcagatgctgttcaaagagccggtagaaatgccggataaagaaaaaatgactgccataatggagaagcacatcggatcaacagagtgcttctgttatgataagaaaatggccggctttgccgccctggatcatgtcgcggaatttcaggacggcaagtgcccggtacagctgatggtgatgaaatgcgacaagttcaagggcaaaggctttgatgcctttctgatgagccagatgtgggactgccaggaggaccgtgaccggatcttccgggagtgcaaatatcaggtggtggccaccgatatgctgactgcggcgcttccagcgctggagcgtgccaacctggatgccgactttctggaggctctggcagagctgtaccccacctgtgaggcgttctatttccagaactgcggcaagctgtttctggcagaggatgtgcgctcccatcagattgaggggccggatcggttcatccgctttggcgtcaatgtccgtttcttcaacatcgagggcacggaggatatgctcatcgacacg

SEQ ID NO: 3602 - DNA, 43437 bp, Unknown
  gut microbiota DNA sequence
caatgattcgctttttcctgttcaaacttttcggtctcaatgcgagcctgttcttttgcccaggccataacatcgtctctggtgggaccatgttcaaccaacaattcttttaatgttccaagtttgcggattgtccgagaggtagattttccgttactgtcgatgtaggattgctttatataaaaagactcagcattttttgattttgatgtattgaccttcaattttttcacctcaataccattatagcgcaaaaagccgaaaaagcctatatataaaaacaacaaatttgacaaaaaaatataagcattcatgcggcttatacgctgtttttcattcggaaaggtgtcaaactcccgtgtacatggagaggttactttttggattaaaatcgttataagatgatgtagtggtaacaaaaatagtgtataatgtgtgtaattgatcggaagagatacaacggagaagggagattttgctcatgacttttaaacgcacaactttagaggaaacactggcagtatcaccgttgcttgtattggatggagccatgtctacacctcttgaaaatatggggatagacttaaatacaaaactgtggactgcaaaagttttagctgatcagccggaaatggtgaaacaggtccataaaaattattttaaggcaggggcggactgcgggataacctgtagctatcaggcaacagttccgggactaatggacattggatatacaaaagaacaggcagaagaactgatcgccaaaagtgttgagatctttttggaagcgagagaagagtggtggcaggaagaaggagaaaaagcaggccatacctggccgctgtgcctggcaagtgtaggcccatatggggcatatctggcagatggctcagaatatcgggggcattatgaagtgtccgaagagactctttatgaatttcataagcacagaatggagcttttgtgggaagcaggggcagatctgcttctgcttgaaacacagccttctttgagagaggcacttgtagaggctaaaatcgcggaagaaatgggggcagattactggatcagtttctcctgtggggatgataaacacattaatgagggcacaaagattgcagagtgtgcaagagcattttcccgggatccccataagtatcctcatctgaaaatgataggagttaattgcaccaaaccggcatatatagtcagtctgatccgggaatttcggaccgctacagatctgcccattgcggtatacccaaacagcggagaagaatatgacccagtcacaaagacctggcatggaaccaatgataagcgcactttttatgactatgctttatcttatttccagaatggagctacagctgttggtggctgctgcaccacagtagaaagccatatccggcaggtgacccaggccagacgggattttgaaaaggcggggattattctgaaaatgagaaaaatggttaaaaaacctcttgcaatttcaaaaaaatagtattatagttacaactaacaagtgaataagatcttcagggcggggtgtgaatccccaccggtggtatagcccacgagccgcaaggtatgattcggtgaaattccgaggccgacagtacagtctggatgaaagaagatagagaacaggatagatgatatagtaagatatagcatcagatatttgttgaacatcagctctgaaacagtaattgtttcagggctttttgatttttaggcagtgtttgagttatttaaaaattatcatgaatttcccattttttacaaaacgctctggagaatacgataggatccagggcgttttttgatgccatgcatattgcgggatgcattagagatgtgtcaacggattaggcgttcctgaaagaaaacgaggaggcgaaagtttgaaaaaaacagagaattacagtgaagacgaaaaatatatgtccgtagccattgagctggcgaagaaggggtacggctatacagcgccaaatccggtagttggggcagtgatcgtaaaagatggctgtattattggtcagggataccatgaaaaatatggagaacctcacgcggagcggaatgcgttggcttcctgcagccagtctccagaaggcgccacgatctatgtaacgttggaaccctgctgtcatcacggaaagcagccaccatgcacagatgccatcatagaagcaggtatcagccgggtagtgaccggttccggggatcccaatccattggtgggtggaaaaggaatccggattttaaaggatcatggaatacaggtaacagaacatgtgttgaaggaagaatgcgacggattaaatccggtatttttccattacatccagactggccgcccttatgtgaccatgaaatacgccatgactatggatggaaagatcgccgcttataccggtgcttccagatgggtgaccggggaagaagccaggcatcatgtacatgaacagcgaaagaaaaatactgggatcatggtggggatcggtacggtactggcagatgatcctatgcttaactgccgcatagaaggaggcagagatcccatccgtattatctgcgatactcatttaaagacgcctgtgacctcgaagatcgtaaaaaccgcaaaggatattcctactatcattgcctgctgtgtatcagatgaagaactgcaaaggccttataaagaggcgggctgcaaaatacttttaacagagaagaaaatgggccatattgatctgcagcatcttatggagctgttggggaaagagaagatagacagcgttctgttagagggcggcggtactcttaactgggcggcattagaagcggggatcgttcagaaagtacaggcatatatagcgccaaagctttttgggggaacaacggccaagactcccgtagaaggaagaggcgtagaagaaccggatcaggcatttctgatcaaacataaaaaggtcagagttctgggagaggacctgctgatagaaggagaggtggagagaaatgtttacggggatcattgaagaaaagggcacgatcagtaaaattatgaaaaacgccagtcaggcagtccttactataaaagcgcagaagatcatggaagatatccataaaggagacagcattgcagtaaacgggatctgtcttacggttacagcattttctaaaaatgaatttcaggcagatgtaatgcatgaaacattaaaccgcactgcacttaaaatgctaaagccgggaagcagtgtaaatctggagcgggctatggcagcaggaggcaggtttggaggtcacatggtatccggtcacattgacggtaccggaaaaatcgcagagataaaagaagacagtctggcgatctggtacaccatagaagcaccgccacagatccttcgatatattgtagaaaaaggttcgattgccattgacggaatcagccttacagtagcaaaggtaacgcagacaactttctctgtttctaccataccccatacaaggagtgctactacattaggagagcggagaccaggagatctggtcaatctggaaaatgatattgtagggaaatatgtggaaaagttcatatgtgagaaaaatactcacggagcaatagtggataaaaatgagaaaaaaactcacggaataacgagagagaaactgatgcaatacgggtattaatggatatgaattaaaaaatcccgaagtacgtagagaaaaagagaggagaaatatcatggatcagaggaagaatacagaaaatggatttaatgaaaatggatttaatacagtagaggaggcactggaagatttaagacagggaaaactgatccttgttacagatgatccggacagagaaaacgaaggggactttatctgtgcggcagaatttgcaaccacagaaaacattaatttcatggcagtccacggaaaaggcctgatctgtatgccaatgtcagaagcttatgtggaaaaattgcagcttcctcagatggtcacaaagaatacagataaccatgaaactgcgtttaccgtatccattgactgtgttgatactacaaccggtatctctgcagcagagcgttctatcactgccatgcgctgcgtagcagaagatgcaaaaccggaagattttagacgtccgggccatatgttccctcttcttgcaaagaaaaatggtgttttagagcgtaatggacatacagaagcaacggttgatctgtgccgcctggctggtttaaaggaatgtggcctctgctgcgagatcatgaaagaagacggaaccatgatgcgcaccccgcagttaaaggaactggcgaaagaatggaatatcaaatttatcactatcaaagatcttcaggagtacagaaaagtccacgaacagctggtggagcgggtgactataacgaaaatgcctacaaaatatggcgtgtttaaagcttatggatatataaaccgactgaacggagaacatcacgtggcattggtaaaaggtgatataggaaacggggaagatgtgctttgcagagtccattcagaatgccttactggagatgtgttcggttccctgcgctgcgattgcggccagcagtttgctgcagctatgacacagattgaaaaagagggcagaggcatcctgttgtatatgcgccaggaaggcagaggaatcggcctgatcaataaattaagagcctatgaactgcaggaacagggaatggataccttagaagccaatcttgctcttggttttaagggagatgaaagagaatattatatcggcgcccagatattaagagacctgggagtaagaagcatgcgtttacttaccaataacccggataaagtgtatcagctgtctgcctttggcattaagatcacagagcgggtaccgatccagatgcaggaaacagaatatgatcatttttatctgcagaccaagaagatccgtatgggtcatatgctgcagtaatattaaaataacatacatatacgaaaggaaacaaaaatcatgcgtacattagaaggaaaagtagtagcaagagagatcaaagtaggaatcgtagcagccagatttaatgaatttattgtatcaaaattagtggcaggtgccagagacggcctgctgcgccatgatgtaaaagatgaggacattgatcttgcatgggttccaggagcttttgagatcccgttgatcgcatctaaaatggcaaaaagcggaaaatatgatgcagtgatctgcctgggagctgttataagaggagcaaccagccattatgattacgtgtgcagtgaggtttctaaaggcattgccagtgtgtctttaacaagcgatattccggtcatgtttggagttctgaccacggataatattgaacaggccattgagcgtgcaggaacaaaagcaggaaataaaggctatgactgtgcccttggtgctattgaaatggtaaacctggtgcgtcagctggaaaattgaaaagcagaaaatgcaaaatatggatcatgagattggcaataacaatcgtgaacgcaaaaaaagccgcccatccaggcggcttttggcgtatattatttcttttcacttttcttttcccgtactttctcatgcaccttaagaggcatcatcagatgctcgatcatgatattgtaagctttctggccatccccttctttcaatgcgttataataagccagatgttcatccacagttccctggatacggccttctgtggaaagggcatcctgagaggttaagtggatcaggtacagcaggcgctggaagatctggttgaattcatcattgtggagatagttgacgataagcagatggaactgatggtcataataaatgaaatcttccaaagcgtcagaatttaatgcttcttccatgttatccaggatcatttttaaactgcgcagcaactcttttccttctttggtatctgtctgtgatgcgatcacggtggtacagaagccttcaatagcgcagcggatctggatactgtctttcatatccttttcatttaactgacggatcataaagcctttgcttggtataatggtgatatagccgtcctggcttaaacactggagggcttcacgcataggggttcgggaaattcctatttttgcggacagttttgtttcggagtagagctgtcccggctctagttcgccgtttaaaatgccgtttttaatggaatcgtaggcctgcatctgcaggaagcttttttctttcatttcttgtatccatatcctttatatttaaatcaaattctgtatacaatcttaaggctaaagtgttatgtctgtcaagaaaaaccattgattttcctattattttccccatttttttgccggataggggatattttcaaatcaagtcttgtatagaaaagtaacttattgtaaactgaaagtaactattttgtatatatatgacaagggtataagaaagtgcattatcagaaatgcacaaaaacatcgttaaaaatttgttgacttttatttcgttgaaaatcttgacagtataccgacataccggtatactggtatacagataggcgagaaaaaagccaacaaagaaaataaaaaccaattttaaggaggaacctaaaatgtgtgtttatgaaatgggtaacttaagaattgttgatctttccaagatcctggatccaaagacagagagcagaagatgccatctgttccgcttcaataccggcggtgctatcccggatttccacaccaacatggatctgatgagccatctgggaacccactgtgagtgcccttatcatcatgatgataactggccatctgtagctgagctgcctttaaccactttcttaggccgtgcagtatacgtagacttcaaggagactgttgctaagcgtggacatatcaccgctgctgacttagaccgtgaagctggaaaggtaagagaaggagatatcgttatcatcgactcttcctacaagctgtatccatttacacctgataccaacactgacaaggatcagcgtctgttagttggtgctgagagcgctgagtggttcaaggctcacaaggtaaaagctgttggctttggtgatggtgtttccatcgaaaactgcaacgaagatgttaagcctttccatgacatcttaatggcagagaacattgtattcctggaagttttaagaaacttagagcagcttaagaaggatgtattcttcatgagctattccccacttccaatccttggactggattccagccctgttcgtgcatatgcaattgaaggacttgctgagttctccgaataaaccccggacttttaaaagactgcgcccacgcataagaagagtttatgcagggcgcaatctgctttaaggcacagtgtaaacgttaaacgtaagaatgggaaaaggagaaagtaaaatgcgtattgcagtgatcggtgcaggagcaatgggttctatctatggtggacatctttcccagcataatgatgttcttttagtagataccaatgaaaaagtagtagagcaggttgcaaacaacggtcttctgatcgatgaagacggaaccactcatacttatcatccaggtgcagtcagcaacacgaaaggacaggaaccggcagatttagtgatcctctttgtaaaggctctgttctccagggcagcattagagggtaaccgtggtctgatcggaccaaacacccgcctgatgactttacagaacggtgcgggacacgaagatctgttaaaggaattcgttgatgaagaccatatcgttatcggtacaaccgaagataatggtgctgttcttggaatgggacatgttcgccgcggcggaaccggtgttaccaatgttggtatgctggtagaagacaaggaaggtttccttcctcagttaaaagaagcatttgaccagtgtggttttaatgtaaagatccatgaaaacatccagactctgatctgggacaagctgtttaccaatgtttccttaagtgcccttacaggtgttctccaggtagacatgggctacattgcagctaacgagtatgcgtgggatctgtgttgccagctgatccatgagacagtaaagacagcagcagcagccggactgaatttcgatgaagaaaaagttcgtgaaaaagttaaaaatacttccatcaacaatccaaacggctgtacttctatccgtgcagacctgcgtgatggcagaagaacagaagttgataccatcagcggcgctgtagtacgtgcagcacacaagtatggtgtggaagttccgggccatgagtgcattgtacgtcttgtacatgcaatggaaggcagaaacaaataaaagcttttatttataaaggctttaaataaaataaagggagagaaaaaatgatcttttcatctatcaagaatggtgattcttttgaaaagtaccctgcagcgatccagactgcattagagtacttaaagagccacgatttcgcatctatggaacctggtgtatatgagatccagggaaaagacatctatgctcaggtatttgatgccatgacagaagatgttgctgacagacgtccggagtctcatgagaaatatctggatgtacagttcttagtatccggaagagagcgtcttggatttaccaagaacaccggaaactacaaagtagcagagcacattaaggaaagagacctgatcttctatgagtctgtagaagatgaaggatacattgagtcccgtccgggatgtttctgtgtattcttcccatccgatatccatcgtccacaggttatctccggcgaagctatgaacctgcgcaaggttgtagttaaggtaagcgtagcactgctgtaattatattacgggggcagtgtcgctgcgtacaggataattgtgtatataaaaattttatagatcagtaaacttagcagctcagcatgtaatactggcctgaaagacgattttcgggccaatatgctgaactgctataatattggaaaaatccgtaaaaaaagtgttaaaaaatgcgttaacgcaagttaacagcaagaaaatatttgaaaaatcaatttgtaaaaccagtaggaggatttaccggtatgtttaaaaaattggcaatggctgtgggggttatttgccttatgggtatgcttacagcctgtggacgtacttccgaacagaaggtgacagagattcgcgtagctttcaaccagaacgagaaccatccgcagtatcgtgccatgaaagcatttggggaaaaatttgagaaggaaacaaacggacgttatcatgtaaccatttatcctaacggggtattaggagagcagggagcaatggctgaatttatccgtacaggagcgctgcagatggcaattgtgccatgttccgttccggaaggatatgacgctgactttgcgatcgtaggtgcaccttatctgtatgataatatcgatcatcttgaaaaagcaacattaaacggggtatttgatgatctgtttgcatctactgaaaaatacaaattccgtgtactgactgtttatacagcaggcgagagaaatgtatatgcaaagaaaccgatcaattctgcagacgatcttaaaggtatgatcattcgtgtaaatgacagcccgacctatgtagaaatggcaaaactgatgggcggtaacggaagcgttatggcacagtctgaggtttacacagcactgcagcagggcgttattgatgcagctgagaacagtgagctggtttaccgtgacttcaagcattatgaggtagctccttactatgcttacacccgtcacattgtacatcctgacgtagtacttgcaagtaccgcattcttaaattccttaagtgatgaagacagagagatcttcgacagactgatcaaggaatccactgaagaagaatttgaaacatttaaacaggatattgaagtagcaaagaaagatgccgaagaagccggaacccagttctgctatccggataccaacgaactgcgtgagcgctgcatgcctctgttaaataagatcgcaaaccagtctgacatgacaaagcagatctatgacgcagtagtagctttaagagaggaggacaataaataatgaaaacattaaaacatggattagaccgctttttagctttcgtctgtatcgttgattttatcgttatggtccttcttaccgtataccaggtagtagtccgctatgtgttcaaaagcccaagcagtgtcagcgaagttctgacccgttactgctttgtatggctgatccttctgtccgcaacctatgtgtttggacagcgtgatcatatctgcattacttatttaaaggataaactgaatggcagcaccaagagactgttagatgctgcgatcgaagtagttattattctcttctctgcgctgatcctggtttatggtggttccgttatcacaaccatgaacatgctgcagtatgactctatccttaagatccctacaggaaccatttacagtatcattcctgtatgtggcgtactgatcattttctacagcatctataatctcactgtagaactgaacaagaaagaaggaggagagtaagttatgtctatcgcagttcaggttgccctggtaatggtcgttcttctggttttattactggcagcaggtgtgcccatcggtgtgggaatcggactttcttccgcagtttccatgatctgcatgctgccatccaatgtagcgtttgcaacatccgcacagagaattttcgcaggttccaactcattctcactgatcgcgatcccgtttttcattcttgcaggaaacattatgaataacggtggtatcgcattaagacttgtaaactgtgcaaaggtcatcggcggccgtatgcctggtgcattagcacagtccaatgtaatcgcaaacatgcttttcggtgcgatcagtggttccggtgcagcagctgctgcagccatcggaagcaccatgggaccgctggaagaggccgaaggctatgataagaactattccgcagcagtaaacgttgcatcagcacctgttggtatgctgattcccccaagcaacactatgatcgtttattctacggttgcaggaagtgtatctatttccgcactgtttatggctggttatgttcctggtctcatctggggcttaggcgttatcatcctggcaaccatcacagcaaagaaattaggctacagaggcgaagcaaagctgacagccagcattgtattaaagactttctggcaggcgatcccaagccttttaatgatcgttattgtaatcggcggtattctttgcggtgtatttaccgcaaccgaaggttccgcagtagcagttgtttatgcaaccgttctttccttaatttatggttctattaaaattaaggatattccaaggatcgtactggagtccgcaaagatcacaggtaccattactttcatgatcggactttcttctatcatgtcctgggcaatggcatttaccggaattccggatatggtagctgcagctgttcttggtattacaagcaataagatcatcatcttcctgttaattaatatcatcctgctgtttgtaggtactttcatggacccgacaccagcaatcctgatcttcactccaatcttcctgccgatctgcacaagccttggaatgaatgcagttcagtttggtatcgtactttgctacaacctgtccgtaggtaccattacacctcctgtaggaaccatcctgtttacaggctgtaaggtaggcggcgttactattgaaagtgtcatcagccacctgctgccatactttgtaatgatcatcatcggtctgctgcttgtgacctatgttcctgtactttcactgggactgccgtcactgttaggcttactgtaggaaattgtgcgtaagcaaaatagcataaagaataatgaaacaggcgtcatcggaattttaccggtggcgtctgttttttaaatgtgctatactataaaaatagtacgataaattaattagttgtcataaaattataatgaccagcatacacatatacatagcgaaaatgaaaaaggactgcaaagtgccttttcgccacaaaagcggggtgacttattgaacatcagacaatctcaggaagaactggaacttgtaactttaagcccgtatgcctctttttctgcaaaaacaaagggcagagacaggcaggaacctctctgtgatatccggccggaataccagcgggacagggaccgtattctgcattgtaaggcatttcgccgtatgaaacataagacccaggtatttcttgcgcctgagggagatcattaccgcacaagacttacccatacattagaagtgtcacagatcgcaaggaccattgcgaaagccctgcggttaaatgaaagtctcaccgaagctattgcattagggcatgatctggggcatacgccctttggacattccggggaagctattttaaatgtgatctgcgaggatggttttacccactatgaacaaagcgtccgagtagttgaaaagctggaaaaaaatggaaaaggtttaaatcttacctgggaagtgcgggatgggatacgaaatcaccgtacagccggtcatccttctaccttagaaggcggcgtggtccgtctctctgataagatcgcctacatcaaccacgatatagatgatgccatccgggcgaagatgtttgaggagaaagaccttcctgtctgctatacagatgtgttaggccacagcgtccgggagcgtttaaatatcatgatccacgatattatcttaaacagtctggataagccggggatctttatgtcagaaggcatggaagaggccatgatgggtcttcgtcagtggatgtttgaccatgtatataaaaatgagatcccaaaagcagaagagggaagagcccagcagatgctttcccagctttatttctactatatggatcatgtagatgagctgccacaggagtatttaaacttcttagatgcgggagaaaaagtctcgcgggtggtttgcgactacatagcaggcatgagtgatatctatgccattgaccagtttgaaaaattatttgttccaaaacgctggaacgtatattaaaacaggggcaatgtttttgtgcccgatattactttaacagaagggagaaaaagcatgtactatccggatgaagtcatagaggaagtaagaatgaagaatgacatcgtagatgtgatttcaggatatgtaaagctgcagaaaaaaggagccaattattttggcctttgtcctttccataatgaaaaatcaccttctttttccgtttctccgggaaaacagatgtattactgctttggctgcggagctggaggaaatgttcttacctttgtaatggaatatgaaaactatacctttcaggaagcccttcagtccctagcagaccgggcgggagttactcttccaaagatggaatacagcaaagaagccagggagcaggcggaatttcgtgccagactgctggaggtaaataagctggcagccaattatttctactaccagatgaagcagccacagggaaaaatcgcatatgaatatttccatgacaagcgaaagcttacagatgagaccatgctccggtttggccttggctattctaataagaccagtgatgatctgtaccgtttcctgaaagaaaaaggctatgatgatgcatttttaagccagacaggccttgtgaccattgaagagagaggcggaagagataaattctggaaccgtgttatgttcccaatcatggatgtgaacaaccgtgtcatcggttttggcggccgtgtcatgggagatggggagccgaaatatttaaactcaccggagacaaaattatttgataaaagccggaatctgtatggtttaaactatgcaaggaccaccagggaaaaatacatgctggtatgtgaaggctacctggatgtgatctccatgcatcaggcgggctttaccaacgcagtggcatctttgggaacagcctttaccagccagcatgcaggtgttttaaagcggtatacggaccaggtgatcttaacctacgacagtgacggtgccggtatcaaggctgcgctgcgtgccattcctatattaagggatgcaggtatttctgccagagttttaaatatgaagccatacaaggacccggatgaatttattaaaaatatgggggctgatgcctttaaggagcggatcgcccaggcaaagaacagcttcctatttgaaatagatgtattaaaacggaactatcaattagaagatccggagcagaagacgaaattttatcaggaaacagcaaagaagcttttacagtttggagaaccgctggagcgggataattacatccaggcagtatccagggagcagatgatcaaagaagaggagcttcgccagctggtaaaccgtctgggaatgcagatgggcttaaaagccggtgacagctacagggaagatgcttccggaagaaatgttatttccagggaaaatggaagcggtccaggtaatgatatgggccggccggaatatggcggcaatccttatgagggacaggcagcgcagaaccaggcggccataaagaaaacaggaagaaagcaggagcgggaagacggcatacgaagatcccagagactgctgcttacctggctgatcgaaaatccggcgttatttgacaagataaaaggcattataacagccgatgattttgtggaagacctgtaccatcaggtggcagtcatggtatttgaaggccatgaagcaggaaatgtaaatccggcaggtattttaagccggttcatcaatgatgaagaccagtacaaagaagtagcggcattatttaatgccagcttaaaagaatccttaaacaatgaggagcagaaaaaggcatttgcggaaactgtgatgaaagtgagaaagaacagtttggataccgcaagccggaatgcgaaagatatagcccagctgcaggagatcataaagcagcaggcagcgttaaaacagctgcatatatctttggattgatttaaggaggaacactatggaaagaacgcgcagagaggaatctttaagctttaaggaaaaaatgggacggcttttagcagatgcccgtgccgggaaacggcagttggaatatcgtgatattttccggtatttcagaccaaaagagctgaaagaggaagaactggaccgcgttcttgacatattagcggaaaaccaggttcagatcctggatgaaggggaagagcaggatgcaggggaaagtgaacctgtatcagaggaaaaaacggggcaggcggatccggtctgcctgtatttaaaagaaattggaaaaatttcccttttaaccccggaagaagaattaatgctggcaaaggaagtaagggccggaagcagagaagcaaaagagaaactggcaagggcaaatctgcggctggtagtcagtattgccaagcattacgcaggcaggggaatggcatttttagatctggtccaggaaggaaacctggggcttatgcgggcggtagagaagtttaattacgaaaaaggctaccgtttcagcacctatgctacctggtggatccgccagtccattacaagggcgatagcagatcaggcaaggactatccgcatcccggtgcatatggtagaagtcatcaaccgggtgatgcgaagttccagaaggatgcttcaggaactgggacgggaacctactactcaggaaattgcagaacgcttacatatgaccagcaaaaaagtagaagaagtgctgaatatggcccaggagccggtttctttggaaacaccggtgggagaggaagaggacagtcatctggtggattttatccaggatgaaaaaatgtcttttttgcaggatgaggcttcttttgtgtttttacatgagcagctgatggaagtattaaaaacgttgactccgagagaacagcaggtattgtcattgcggtttgggctttatgacgggcagccaagaacattggaagaagtgggaaagcagtttcatgtgaccagggaacggatccgccagatcgaggataaagccctgcgcaaactgcgccaccccagcagaagccggaaattaaaggactatttagaaagttgaaggatagatatgacagaaaagatacaggaaacagagataaagaagacaaggcttcgcctttcagaacgtttaaagctggttgcttcttttgtgccggaaggcagccggatcgcagatatcggtacagatcatggatatgtgcctatttatctggcagaaattggaaaaattaaaagtgctctggctatggatgtgcgaaaaggtcctttggcaagggcagatgaacacatagaagaatacagacatgacgtgggggatgcagctatttccatagagacccgtttaagcaacggactggaaaaattacaggccaaagaagccgatacagttatcattgcgggaatgggcggtgaactggagatcagcattttagaggctggaaagcagttatggagcagtatccgccactggatcttttcaccgcagtcggatttggaaaagttccgccgttatctgaaggaaaatggcttctttattgaaaacgaggcaatgatactggatgagggaaagttttatacagtgataaaagctggttttggaacaaatgaaaaagacgcttgtgtctgtaaaacgctccctgagtatcgcttcggagcggttttgatcaaacgcagggatgccgttttaaagcagtatcttttaaaagaagaaaaaagagtggaagggatcttaaaaggatttgcaggaaagagcgaggaagagctgacggcaggacaggcagctgcctgcaaggctttaaaagaagaactttcatgtatcagggaggcacaagatgaaatgcagtgaagtgatcgaaatattgggaaaactggctcctgaaagctgtgcctgtgattgggataatccggggctgttagcaggacgcagtgataaagaggtaaaaaaaatctatattgctttagatgcaacggaccaggtggtggatgcagccattaaggcaggagcagatatgcttttgacccatcatccccttatttttaaggctattaaaaaagtgaatgaccagaattttattaccagacgtctggtaaagctgatccaggcagatatttcctactatgccatgcacaccaattttgatgcagcacccggctgtatggcagatctggcagcagaacgtctttctttaaaggatacggagccgttggaagctatgggggatatggaaataaatggaaattctgtggcatatggtattggaaaaacaggaaacctggcggaaaagctgactgtaaaagcactggcagaaaaagtaaagcaggcttttgatcttccttttgttctggtgtatggggaagaactgatggatatggaagtagaaaaagtggcactttgtcctggagctggcggaagtgtgatcgaagaagccatccatgcaggcgcaaaggcgctggtaacaggtgatatcagccatcaccagggaattgatgcagcagccaggaatatggcagtgatcgatgcaggtcattacggaatggagcatatttttatccagtatatggctggatatctgaaggaaaatctgccggtagagatggagatcgttacagcgccatctgcatggcctacagttcttttataattgttttctatgtacagcaatacatttttgaaaaggaggatgcctatggtccaactgaaaataaatacccagataaaggaatatccggatgatattacctggcaggtgatagcagatgagtatcaaagcgggtattccgatgaaatattattagtccaggtaaatggaaaactccaggaactgcaggaaaagataagggaaggcgaagtgcagttcattactgcaagacaaaagccgggaatttccgcatatcagcgaagtgccacccttctgatgctgaaggcattttacgcagtggcaggtcctgaaaatgtggaaaaggtcattgtggatttttctattggaaaaggtttttttgtagaagcaagaggaagtttcacattgaaccaggagcttcttgaccaggtgaaagccaaaatgcaggaatacgtagatcaggagatcccgattttaaagcgcagtatttctacggatgatgccatagagcgttttcacaaacaccggatgtacgataaggagcgtctgttcctctaccgccgtgtatccagagtcaatgtttacagtattgacggatttgaggattatttctacggatatatggttcccaatacaaaatatatccgttatttcaatctgaagttgtatgaatatggctttgtgttcatgctgccgtctatgttggcaccaacagtgctgccggagtttgcgccgctgccaaagctgttccatacacttgcggactcttcagagtgggggaaacgtctggatctggagacagtaggcgcattaaatgacaagatcgcagctggagatatgtcccatttgatcctgatccaggaggcgcttcaggagaaacggatcgcagagatcgcggcccagatcgcagagcgcaaaactgccaagatcgttatgatcgcaggtccttcttcctctggaaagacaacattttcccatcggttgtccgtacagttggaggctattggcttaaagccgcatccaatcgcggtagataactattttgtcaaccgtgtggacagtccaagggatgaaaatggtaattataattatgagatcctggaatgtctggatgtagaacagtttaatcaggatatgcaggctcttttaagaggagagcgtgtggaactgccttattataacttcaaaaaaggagaacgggaatacaagggagattttctgaaactgggaaaagatgatatcctggtgatcgaggggatccattgcttaaatgaccgtttatcctattctcttccaagagagagcaagtttaagatctatatcagtgctctgacccagttaaatattgacgagcacaaccgtatccctacgacagatggccgtctgctgcgccgtatgatccgtgatgcaaggacaagaggggcgtcagcccaggataccatccgtatgtggccatctgtgcgaaagggagaagaggaaaatattttcccctatcaggaagaggcagatgctatgtttaactctgctctcatttatgagctggcagtgttaaaacagtatgtggagccgctgctttttggaattccaaaggattgtccggaatatacagaagcaaagcgacttcttaaattcctggattattttatcggggtcagcagcgaggatataccgaaaaactctattttaagggaatttatcggcggaagctgtctggatgtgtaggatagcaagtgtccacatatgatatttttaatatgatatttttggatttacccatggacatggcaaagaaactatgctaaaataaacaagttgtgagtaagacagatggtcgctgctgcgacaccgagaggatgcaggagaggaaagtccgggcttcacagggcaggatgccagataacgtctggcgggggtgaccctagggacagtgcaacagaaatataccgcccgctgcatttgcagcaggtaagggtggaatggcagtgtaagagactaccgcccggctggtaacaggcggggcacatgtaaaccccatccgaagcaagaccaaacagagagcatatggcggcccgtcagctttcgggtaggttgcttgatgctgctggcgacagtagtactagatagatgaccatccaacgacataacccggcttaccgttttactcacaacctttgcaacgatgaagtgcgtctccttgaatgaaaggggacgctttttagcataaaagaaaacgtatgcagtatacagcgaatggtcagactgctctcaatgagagaacatgctgcgcaaaaggagggaattttatcatgacagaaggcggaaaaagaagagatggcattctttcactgttagaggagagcgacactccattatctggaacagaactggctcatcgttttaaggtaagccgccaggtgatcgttcaggatattgctcttttgcgggcagaagataagaagatcctttctacttacaggggatatgttcttgaccgggaaagtgaaaaaaagagaaaatgtatccgggtgttctgcgtctgccattctaccaaagatacccaggacgaacttcagaccattgtagattatggtggccatgtgctggatgtggcagtggatcatccgctgtatgggcagatccgtgcagatctgatcatcaacaaccgcctggatgtagcagagtttgtagaccgcatgaaccgctacaatgcacagcctttaaaggttttgaccggggattaccattatcatacagtgactgcggaatcggagaaaaacctggattttattgagcaggaactgcggaaaaagggatacttaaaagaagaatagagataagaaaagtaattgcaggcattaagaaagcgcccaacctcacattgtgaggcggggcgctttttgcatctggtgtagactcacgattagactcacgaattccgtgctgacgcactctactgtctgcttgcgcagacaattcgttcgttgtccctatttatttcacaacatccagatcaaatccgaagtactgaacagcgttgttgtagctgatgcccttaacgatggactctaaggacttcatatctgccggatattcgccgttttctacccagccgccaaccagtgcgcagagaacgcgacggaagtactcatgtctggtgtaggataagaagcttctggagtcggtcagcataccgatgaagttgcccaggcagcctaagttagccagggataccatctgatcggtcatacctaccttgtgatcattgaaccaccaagcggaaccctgctggatctttcctgggaatttctcctggaagcagccgatgatggtgccgatggaagcgttgtcgtttggatttaaggagtaaatgatagtcttaggaatatcattggttgcgcttaatgcatttaagaaatctgccatctgtgcgcttggagcgtagttgttgatgcagtcgtaaccggtatctgcgcctaacttgtcaaacatgtaagcgttgttgtcacgcttgcatccgtagtgaagctgcataacccagtttctcttggtgtattcttttgcaacgaagagcatgaactcggtcttgtactttaattcttcttctctggagattgcttcgccctttaagcccttagcgatgatagcgtttacttcatcctcagtagctggaacgtacataacatactctaatgcgtggtcagatacacagcacttcatggaagtaaagaaatccatacggttctttaaagcttcctttaaggatgcgaaatcttttacttcaacaccgctgaccttggataactgatccatgtaagcagcaaaagttggcttctctacgttcatagccttgtctggacgccatgctggcagaacctgtacatcaaaagtagtatcttcagccagtttcttgtgccattccagagagtcaacaggatcatcagtggtgcagatcagagtaacgttagactgcttgatcaggttacggacagtcatggagtcttcctgtaacttagcgttgcacaggttccatacttcctcagcagtatcgccgtttaagtagccttcgtatccaaagtatcttcttaactctaagtggctccagtgatacagtgggttgccgatcagtttaggcattgtctcagcccatgcctggaatttctctctgtctgtgccgtcgccggtaatgtatttctcatcaacaccgttagaacgcatctgacgccatttgtaatggtcgccgcccagccatacctgggtaatgttttcaaacttacggtcttcatagatctcctgtgggttgatatggcagtgatagtctaagatcggcatattttctgcgtaatcatgatagattgtttttgccatgtctgtggataataagaagtccttgtccaaaaactgtttcatagtggtaaatcctcctttaaaattggaatttaaaagtttgtggtttttctttttattaaagcagaggcgatggttgtccggtttgggacattagcgccactgaaaacccccattaaagtattgacagtagtggtgcaaagtgcttctaccttgctgtcaatggatgtgatctccggatctgtacaacgtgccaggagagaattattatacccgataatactaagctcttccggcatggaaataccggctgtatgggcatattttacggctcctacggccagtgaatcgtcagaagccaaaactgcgtcaaatttcagcccttcttctttcaggcttaaaagaagatccctggaattttcaaaactcttggaacattgatgaatcatggagtcctcaaccgggatacgattttctttcaatgctgctttgtagccctccatcttattaacaccgctgtaggaaacgctggtgtaaagataaaggatacggctgtgtcctgaatggatcagctgtaatgtggcatcatacatagaggcataatcatcacagacagtactgtagatattctttccttccagataaccgtttactaacattacaggaagtccgtctgcggcagcttctataatataattattatcccgggaacgcatttccacaaatttggaacctgccaggataatagcatccacgcgcttggagcgaagcagattaaaatacttctgttttacatccaggtcgtaaccggtacagcagaggatagaatcataattatgactgcgcagttcccgctccagatagtagatcgcctcagcaagataaggatcagaagagtcagaacacatgataccgatggtctgcatggtatcaagtcccagtcccctggcaaaaacattgggggtataacccaactcatccattacagccagaaccttcttgcgggtgcgttcacttacgttgggattgccgttgagtacacgggaaaccgtagcaatggaaacgcctgcgcgctcagaaacgtcatatatattcattcagtaatccacctcacattctgtaagcgcttacacgctaagtctattatacatactactaataaagattgcaacagttttctattgacttctgtgtagaaaataggtagaatgattgtaagcacttacaaagtgatctgtagttaaaataaatcaaatgtattccggaatcttttgcaacagattttattttgggaaggtttcctgagtacaaaaacaaagataggagattaaagaccatgcaggacattgtcaagatcaatcagaatgataacgttgccgttgctcttcgtcctttaaatgaaggagagaccctggatgtagcaggagaaaaggtaactctggtccaggatatcccacagggacataaatttgcccttcgtgccattgcacagggtgaagaggtagttaaatacggtttccgtatcggctacgcaaaagaagctattgaaaaaggcgcatgggtacatgttcataatgtaaagaccgctttaggcgatgttctttcttatgagtataaaccagaaggaagcaaggacgtagagccatctgggcatgtatactttgacggctaccgcagagcagacggaaaagtcggtatccgtaatgagatctggatcgttccaactgttggctgtgtaaactctattgcaaaggctcttgagactgctgcaaagaagtttgtaggcggaaatgtagaagatatcattgcattccagcatccatatggatgttcccagatgggtgatgaccaggaaaacaccagaaaagttctggcagacatgatccatcatccaaatgcagcaggtgttctggtattaggacttggctgcgagaacagcaatattcctgtattaatggattacattggcgagtatgatgagcagcgtgttaaattcttacagtgccaggatgtagaagatgagatggagaccgctatgggtatcctggaagaactggcaacctatgcaaacgcattctccagagagaagatcgacgcaagcgaactgatcatcggtatgaagtgcggtggttctgacggactttccggtatcactgcaaaccctgtagttggtgctttctctgatctgttagtaagcaagggcggaactactattttaacagaggttccggaaatgtttggtgcagagactctgttaatgaaccgctgcgcaactccggagctttttgacaagaccgtagctctgatcaacaacttcaagaactactttaccagccacaaccagactatttatgagaacccatccccaggtaacaagaagggcggtatctctactctggaggataaatccttaggatgcacccagaagtcaggaagttctttagtaaagggtgtattagagtatgcggagccagttaaggttaagggattaaacctcttaagcgcacctggaaatgacctggtagcagcaactgcgctggcagtatccggcgctcatatggtattgtttactaccggccgcggcactccgtttgcttcccctgttccaactgtaaagatctccagtaactccaagcttgcaggacacaagtccaactggatcgatttcaatgcgggacagatggtagaggataagaccaaagaagaactggcacaggatctgttaaactatgtattggaagttgcttccggacgcaaggttaaatcagaagcagccggttttcatgatatggcaatcttcaaacagggtgtaactctgtaagtattagtgaacaaaacagttacggttcatgcgttgcatgaccggcaacggaatttgatctgactgtgccaggaaaacaaaagcgcatcttgtaatctgtttcaggatgcgctatactaaaagaagaaaatcgtatatgcgtataagaaacatatatacgaccaaatacaaaagacatatatgatcgacagaacctgatgcaggaggaacataaatgaaattaaaccggacaacgctgcgcacagtggatatactgaaaatggtttccaaaaagccggatggtattacactggatgagatctgtgagaagttagaacttccaaagaccagcgcctatgacattatcacaacactggcacatacaggtatggtccatgtggtaaaggggcagaagcagcgttataccatcggacttactgcttatcgtgtaggaattaattatacaaataacctggattttatcggtaccattgatcctgtattaaaagcttttgcgaaagaagtgggaaagaccgtattctttggagtgcgttcagatgactctattgtttacatctgtaaatttgagccggaaaatcccattatcacaacagcgactgtaggaaccaagaacccattgtactgtacttcccttggaaaggccattatggcaaatatggagcaggaagagcgggatgccttagcagaccggatcaatttccgtccccatacccagcgtaccattcaggacaagactcatttcatagaagaactggatcgggtccgggaaaatggatacgcctttgacgcaagggagttggaggaacatatggaatgtgtaggttcccctgttttcggcccggatgggaatgtgatcggggccatcagtgtgtccagtctttacaagcctacagaggattatgacgccttaggaaggctggtttgcgagaaggcaaaagcgctttcaagacttttgggatttttgggtaaataaaacaggataaaagataataatttatctgttttgctgttgacaaatcagttggtaactattaaaatttaagtataaatcgtaaatatgaaattaattcgtatttacgaacctcatcgaaagaaggagaagaaaaatgaaaaaagaacatgttttagcaagactgaaagaagactgcctggttgctgtagtacgtgcaaagaattatgagcagggtgagaaggtagtagatgctattattgaaggtggcatcaactttatcgagctgaccatgactatggatgacggtgatccagtaggcttcatcaagaagatggctgacaagtataaagacaatgacaagatcgtgatcggtgctggtaccgttctggatccagagactgcaagagcttgcatcttagcaggtgctaactacatcgtaagcccaggcttaaatgtagagaccatcaagctttgcaaccgttacagagtaccaatgctgccaggcgttatgactccaagcgaagctattaccgctatggaagctggatgcgatgtaatcaagatcttcccaggaaatatcgtaggacctgcagctatcagctccttcaagggacctctgccacagggtgagttcatgccatccggcggtgttgacgtagacaacgttgataagtggatccatgctggtgcatacgcagttggtaccggaagcagccttacaaagggcgctaagactggtgatttcgcagctgtaactgcaaaggctcaggaattcgttaaggctgtagcagcagcaagagcataattgttaataaatttcttacagttcagccatgcgctgaactgtaagatcaattttcacatatcttaaggagaatattaaaatggcaaagattgttaccatgggcgagatcatgttaagattatctaccccaaataatgaaaaatttatccaggcagatgagtttgatgtaaactacggcggcggcgaggctaacgtagctgtatctttagctaactatggtcatgacgtacagttcgttactgcagtaccagctaacccaatcggtgagtgcgcagtagcagctttaagaaaatacaatgtaggtacaaagtacatcgcaagaagcggtgagagactgggaatttactacttagagaccggttctgcaatgagagcttccaacgtagtttatgaccgtgcacacagctctatctctactgcaactgcagatgagttcaacttcgatgagatctttgctgatgctgactggttccacttcaccggtattactccagctgtcagcgatgcagcaatcgaactgactgaggcagctttaaaggcagctaaggctcacggcgtaactgtttccgtagacttaaacttccgtaagaaactgtggtcttccgagaaggctcagaaggttatgaccaacctgatgcagtatgttgatgtttgcatcggtaacgaagaggatgcagagaaggttcttggcttcaagccaggcaacactgatgttacttccggagaactggaattagctggatacgttgacatcttcaatcagatggctgacaagttcggatttaagtacatcatcagctccttacgtgaaagccacagcgcttccaacaatgactggtctgcttgcatcatggacggacagactcgtgaattctaccactccagaaagtaccacatcgctccaatcgttgaccgtgtaggcggcggcgactctttcgcaggtggtctgatctgcggtctggctgatggcaaggatatgaaggcagctctggaattcgcagtagcagcttccgcattaaagcacaccatccctggagacttcaacctggtaacccgtgcagaagttgaaaccttagcaggcggcgacggttcaggtcgtgtacagagataattactcttcttaagagttaaaaattaagaccgaaaggcctgtttggaaatagcgttcctggaatgtattttcagacaggccttttctttagaaattttctttaataatacgtttatgaaaattttttaaacttcaggaggatatgaaaatgggagagataaaaggaagaacatttgacctgctgacattaggtcagcttcttttaagactgtcaccaccagacaatgaccgtctttccagaggtgatacatttgtaaaacaggtaggcggtgcagaattaaacgtagcagttggtgcgtctctgttaggccttcataccggtgttatctccaaacttccgtcacatgatatcggcagctttatgaaaggtaagatccgttcctttggtgtcagtgatgacttttttatgtatgatcattctccatcagcccgtgtaggtatttattactatgaaaacggtgcatacccaagaaaaccaaaggttatttatgaccgtatgaacagttctttctttactctggatattgatgagatcccggaggaagtatacacagcttccaagtgtttccataccaccggtattactctggctcttagtgagaagatcagagagactaccattgagatgatcaaacgtttcaaagaagcaggaaccctggtttcttttgatgtaaacttccgtggaaacctgtggacgggtgatgaagcaagagaatgcattgagcgtatccttccttatgtagatatcttcttctgctctgaagatactgcaagactgaccttcttaaagactggtacagcaaaagaaatgatgaagagctttacagaagaatatccgatctctatcgtagcttccacccagcgtatcgtacacagcccgaaacgccatacctttggttctgtgatctatgatgcagcaagagatactttctacgaagaagagccatatcgtgacattgaagtagtagaccgtatcggtagtggtgatgcttatatttccggcgctctctacggcctgttaagcagcggtggtgactgccagaaggcagttgcttttggaaacgccacagcagctgtaaagaacaccattcctggagatcttccatcctctaacctggaagaaatcgagaccattatcaaggcccataatcagaccggaccacagagtgagatggcaagataataaaagcctgttaaaaggtttcaaaactatattgtatataaaaaaaggagctttcctgtaattatatgggaaggctcctgttttgttgtagagatttaaaaaagacttaagaaaagctttattggatgtaaggggaatatagtatataatgaacgcagagaaaaacaagcggctgcgtcagcagacatttgtttttctcaagtcattaacgaaggttccgcctgcgtcagcaggcagtggagcgcgtcagcacgggaacctgagtattagagcacagttaaagaaatgatctttgttatagaaaaggagaaatcatattgagaaaatatcatttatacgcagcagtattatgcagcgcagcagttttaggccttggcggatgctccaataaagtggatgcggcaaccacattgcctcttgtaaatgagtcaagaccagtggtggtagagtctgaagaacctacttcttctgcagaagagactaccgttgtagaaactgtaagcggcacgatcgaaagtgcagaagagcagccagagcaggcagaagactctgtatgcctgtttggaccggctacccagatggaagatggcagattatccattgacagtcaggcagatcagggatatcagggagaagtgatcttaaacgtttcccaggagtctacttatgtattagacgcagtttccggtcttccaatagagctttctgatattaaagacggagacaccatctacgcttacatcggaccggcaatgaccatgagccttccgccaatgaccaatgcgacgatgatctttgccaatgttccggcagattttaaggttccggactatgtaacagttaaatcagtagtgacagatgcagcttcttcccagtctgtactgactgctatggacggcacagaatatacattggcagatgactgtgggatcgtaccgtatcttaccagaaatattgttacgttagatgacctgactcagggcagaaaagcagtggtatggtctgatggagagaatacagcaacacggatcatggtatttgcagaataaaaattgaatgaaagaattaagggacgcaccggttggcgcgtccctttgctatctagtttccacactcaatactgatctcattaaatttcttaaggatatgatcaatggtagtagcgtctttttctgcgcctgctttatcgatcactgcatgtccctggtgcatcattaacagtctgtcaccatattccacagcaaagcggagattgtgggtgaccataatggtagtcaggttcttttcacggactactttgttggtcagttccatgatcgtttccgcagtttttggatccagagcagcagtgtgttcatccaggatcaggaattcaataggagtcatagtggacattaaaagtgccattgcctggcgctgtccgccggagagaacgcctacttttacgtccattttatcttccagtccaaggccaagggagcggagagattcgcggtagaattccaggcgctgtttgttggttccaggacggagattgaaggctttgcccttattatctgctaaagccatgttctctgcaatggtcatagaagggcaggttcccatagacgggttctggtaaacgcgtccaatgcggcgctgacgcttgtattccggcattttggtaatgtcttcgccaccgatgataatacggccgtcatctaacgggatacttccgcagatgatatttaaaagagaagttttaccggaaccattgcttcctactacggatacaaactggtggtcttcaatggttaagttaaaatcattaaacaggcacatttcatttactgtacctgcgttgtaatatttatggatgtgttttaattcaagcatggctctttaccttctttccgccggaagggcttactacaaggatgatcaggaataatacagaagtgatcagcttcaagtcggatgcagtgacaggaatggaaaggtccagtcctgcaatgtgcaggtcatttaacagcagcgcaatggatacgcaggctttgtatacaatggaaccgatgataacagcagtagtagagcggataaatccaactctttttaacagctgggttccgatgatcacatttgcaaggccgatgaccatggtaccagtaccgatggagatctcaaagaagcctttctgctggcagtaaacgcttcctgcaagagctgcaaaaccgtttgcaatagcaagacctacgatctttacaaggcctttgtcttttgcaagagaagtgaccagtacgtcattgtcaccaactgcacgaagcaggtatccggaacgtgtctgtaagtaagcgtctaataacaccttgcagatcataacgatcacaaacaggataatggtcacgataaatggggatgcagcttccggcacatgagcggaaaggaaggaattggaaaagatggtttccttactaaaaataggaaggtttgcttttcctgcgatccttaaattaatggaatagagggccgtcatgacaatgataccggagagcaggtcacgtactttcaactttacgtggatgagaccggtgatacagccggctaaagcacccactgtaaaggaaatgaataatgctgctacaggtgaaatggtaccaatgaaaggaagcccgtttgcaatgcctgctgcagtcactgcagcgccaagtgggaaggtgccgtctacagacagatccgggaagtccaggatcttataagtgatgtaaacgcccagagccatgatggcatatacaaggccttcttccagaataccgaaaatgatcgttgtcatgatgttcctccaatacttgtgttcctactaaaattactctgtaatgctgtcaaagagttcagcagcatttcctgttaaagactcaggaagagtgatgccaaggttttcagctactttggtgttgccgtagaatgcagcatccttaatggtctcaaagtttaattcacttgcttttgcttcgccttttaatacctttgcagccatttcaccggtctgcttgccaagttctacataatcaagacccatagcagccaggcagccgatctttacctgctcgatctcacttccgaatacaggaatgttctttgcggaagccttgcttaagataacaggaagagatgctactactgtattatcggtcagatttgtgatacagtcaacctttccaattaaagtatctgctgccagaggaatatctgcagaagaggagataccggagtctacgatctcaaagtcataatttggagccagttccttgtattctgcaatcgcagactcagagtttacttcgctggtggtgtacatgataccgatggtctttgcatcaggtaagatctcgcggatcatctttaactgctgctctacaggaagcttatcgctggtacctgtgatctcgccgattgggattccgtctgcatttgccagttcggctgcaactgggtcagtaactgcggtgaagataacaggaatatcagatttcatagccacgctatattcagcctgagccataggagttgcgataccacacattaaatctacgttctttcctgcaaatgtattggcgatctgtgcggaagtaccgccgtcagcctgtgcattctgataaagaacggttaagttctttccttcttcaatgccttctgctgcaaggccttctaagaaaccttcacggcagttgtcaagagagccgtgctctgcaaactggccgataccgatggtgtaggagccgtctgcatcagcggtgttttctgcttcgctggaagcttcctcggaggatgctgcctcagaagaaggggctgctgtggtatctgctgctgtagtagcagtagaagaggagcttccgcagcctgttaataaagctgcgcccattgctgcggttaaaaggaatgccatagattttttcataatacttacctcctgaaaataaaatttgaaataatattttggaataaaaaaagtcccaaacacaatacgattgtgattgagacgaatatgatccgcggtgccactcaaattgactgaaagtccacttttcacatactaacatatgtgctgcaaatgtaacgggtgcagagtccgtcagtccctactgaaatatttcaagactgccctcaaaagtccattcagctgcctgccttataccgcaatcccaccacctgcggctctctgtgctaatgcattggaagcttactcctctttctcaacggtttagctgttaatccgtatcttaatacatagggcgggttttgtcaactgttttttgcaaagctgtatccgttgcacctgttgttatgagaaatttgaagaaaaatttcagtaaatttcagataatatagtgttcggttaggtaaaaatgtgctatacttaagatagcaaaacaagggaggtcggtcatatgagcgataaacattatgtgatcacaatcgagcgtcagtacggaagcggcggacgtattacaggtatgcgccttgcagaagagctgggtattcattattatgatgaagagatcctgaaaatgacatcagagaccagtgctattggagaacagtacttccgtcttgcagatgaaaaagcagggaataacttattatatcgtacagttaccaatatgaagccggagctttccgcacctgtaaaggatggacataggcttacatcaccggaaaatctgttccgcttccagtccgaggtcatccgcaagctggcagagtctgaaaactgcattatcattggacgctgtggcaattatgttcttcaggatcagttagatgatgtagtccgcattttcgtctatgcagatacggttaccagagtccgcagagttatggacgtagacaaggtagacgaagaagaagcactgcgccgcatgaagaagatcgataaggagcgcacagagtatcataaatatttcactggcagaaactggatggatatggaaaattatgaccttcctattaatgccagccgtattgattatgatcagatgatcaaactgatcaaagattatctgaaacttcggggaatgatcgactgatcgttatgacgatgctctttagagatggtagatccgcctatggatggggcagcaatgtagcaacatgaggtagcagatggatattttaacaggaatactgatcccttttataggaaccacagcaggcagcgcctgcgtgttcttcctgcggggagaattaaagcccggagtgcagaaagcatttctgggctttgcttcgggagtgatggtggctgcttctgtgtggtcccttctgatcccggctatggaaatgagtgatggacttggaagactggcttttcttccggcagtaactggcttccttttaggaatggcgtttttgctgtttctggatatggtagttcctcatcttcatatggatacggatcagccggaaggcgcaaaaagcaattggaaaaagagcactatgctggttcttgcagtgaccttacataacataccggaaggaatggcagttggtgtggcttttgcaggtatgctggcaaaaagtgagtccattacactggcaggcgccatggcattgtcactgggaattgcgatccagaatttcccggaaggagcggttatctcccttcctttaaaagaagcggcagggcagaaaaaagcctttgtctacggtatgctttccggtattgtagagcccatcggcgccggtcttatgctgttattggcagaaaaactggagccctttatgccatatttcctttcctttgcagcaggtgccatgctttacgtagtagtggaagaactggtgccggaagcatcagaaggggaacattccaatattggtaccatcggatttgccattgggtttgcattgatgatggtccttgatgtggcattgggataatgcaggttgtgttactttcgccactccacagtcagttctgcttttcgtcttggtcttggagcaggtgcttcatctgcgtagcctacagccaaggcagcatagagctggccgtcagcatttaaccagtgatttaattcttcctgagcaaaaaacgtattacagatccaaagacttccaaggcccagttctgtggcagccagtgtcatgttttcaatggcagctcccatggactgggcattgcatatttctgacacacgttcatcaatggccagcggctgatccataggagaggccagagggtctgtgataaaaataataacaggtgcttctttcatgatcttaagggttgccctggcaccatctaaataaggggcactttctgggagaaaaggctgtttttcttcccgtttcagtcctgcttccatggctttaaggacctgttcctttgcagagcctgttgttacgataaaatgccatggctgccggtttttagaggaaggagccagcatgccggcttttaatatttcttctattaattctttttttacaggaatgtctttatagcggcggatgctccgtctgctttctatttcttttatcatgagtacagatcctttcattgtataggatgttgtgagattgtattatttcggtcgcacggtcagtcggcggatatgtccgtctgcggtcagctgctgtaagctggcaatagccatgacctggtaaccgccgtaggaggcgataagttctgcctgtgagccgttcaggatcgtgggcgataatatggaatactgacagaagagaaacttattccggaaaaacatggaaatggcttcttttccatataaatgaaattcgtgctgggatgtgccattggcgcagtaatcacagtagtggccgtttttggtaaataattctgccagggcttcaaaatcttttgtttcaagagctgtgagatatttctggataacaggttccatgaaagtttcctttctataaaaaatattgatccatatttaatatactttttctgaattgagaagggcgtctgtgccgccgtccacaaacatgataatgccgttgacgcctcttgcttcttttgaaataaggaaattaatggcagaggcgatctcatccggttccataagagtctctttgccatatttggtaggaataggaagggcatttaatgccgtcttttcatccacagacatagtggcagtcatggatgtgtttacgtttccaggtgccactgcgttgatgcgaaccccatttgcggcataagaggcagaatggcggcggacccatctggctaaggcatacttggaagccacgtacaggcggttacctgtaagaaggtcattttcatctaaattggaaaccagatccaggatgcgaagttcatcttcattattattatttaaaatatccgccaggtccatgcgcaggtctccctgggagatagcattggaaacagtggctacgcagctgccgccttttttctctaaaagatcgtaggccccttttataatagaaatcgttccgaaaaagtttaaagaaaggatcaggcgcagatcgtgacaggaaccaggaacgccggcgcataagatcagaccgtctaaaccttctggatgcagctcgtgtaattcatcaattactttctgccgtccttctggaatagaaaggtcggcctggatatctcctgttttccagtcgatattgatagtctcatgtccctgtttttctaattgactgatcacacgcaggccgatcccgccggaaccgccggtaattgcatagactcccataagtgatcctccggtttacaaataattttctttctattataatcgaaattgataccaatgtaatacccagaatagtgaaaaaaaaggataccagatgaaatgctgcattatgagttagagaagaaaaagggtagttctctctatgaagaactgtatcagaaactgaaagaagacattttaagagggcggatcctgccggggaccaagctgccttccaaaagggagctggccagggataatggcatcagcgtaaagacagttttaagcgcctacgaacagctggtggtagaaggctatctttattccaaagagaaaaaaggctattttgtggcggcagtggaagctatgccggagtataaacctgtagtggcagaatatccccagctttacagggaagatcaatggtttgcggattttacagccaacaacacagtgtatgataaatttccattttccatgtggagaaaggtcatgagggaggtgctgtcagagtatgacaaagaactggtaaaaagaggtcattttctgggagttcgccagctgcgggagaccattgcggattacttataccgcacccgtggaatgaccatttctcctgaatgcattgtgatcggagccagtattgaatacctgtatagccgtctgatcaagcttctgcctgcagacgtagtctatgctgtggaaaacccgggatataagaaaatccctgtgatctatgaagaatatgggctgaagtggaagagtatagccatggacgatgggggaatccatatgaaaagcctgcaagacagcggggcagacattatccatgtatccccggagcaccattatccattgggaacagttatgtctgcatccaggcgtcaggagcttttaagctgggcttcagaaaaagaagaacgctatatcatagaggatgattatgactgtgaattccgctatcgttcccggtctattcccgcacttgggagcatggactcccacgaaagcgtgatctatatgaacaccttcagcaagaccctgacaccggcgatccgtatcagctatatggtccttccggagaagctgatgcgccgctacattgataccgccaatttttactgcaatacagcctctacctgtgagcagtatgctctggcaagatttattgaaaatggctattttgagcgccatttaagccgtcttaagaagttttatcatgcagaaggagaacgtttaaagcgtatcttaaaacaatcggtgctactgccggcagtcagcgtggacggaggagaaagcggcacccacctgctggtgaaagtagatacttccatgacagatacggagattgaagaggcagcggaaaatatgggtatccatatttcctgtctgtcccggttctgcagtgagaagaacccggaatatgatcatattttagtgttaaattattctgatatggatgaaagccgcctgacggaagcggtgagaagactgggtaatatttttatccagtggtaaaatctgatatcctttaatagttttattttggatattttaaagatatcagatcagtgttaccatgagcctaccgacacacagggaggaataaagtgttccaaaataaaaactccctgtaggaaaatgagtgaaaaaaataagaaagaaacgaggtacggacacatgggaacaacttattattttctgcctacaagaaacttatttggagaagattccgtaaaggaaacaggttccttaatgcagagcctgggaggaaagaaaactcttattgtaacagatgcatttctggcaaaacagggaatggcccggatggttcaggatatcttaaaggactctggtgttgaaagcgttgtatttggcggggtagagccaaacccgaaggatgtaaacgtagaagccggtcttaaggtattcaaggaaaatggatgcgactctattatctctcttggcggtggttcttcccacgactgtgcaaagggtatcggcattgtagcttccaatggaggaaacatccgggattatgagggtgtggacaagtcacaaaagcctatgtgccctatggttgccatcaacaccacagcaggaactgcttctgagatcacccgcttctgtatcattacagataccagccgtcatgtaaaaatggcgatcgtagactggagagtgacaccacagatcgccatcaatgatcccaagctgatggtaggcatgccaccgtcactgacagcagctaccggaatggatgctttgacccatgctattgaagcttatgtttctaccaatgcaaatccactgacagatgcagctgctaccatggctattaccatgatcacacggtatctgccaaaggcagtcgcaaatggagaatacatgaaggcaagagacaaaatggcatacggacagtacctggccggtatcgcttttaacaatgcttccttaggttatgttcatgcgatggctcatcagttaggtggtttctacaacctgcctcatggtgtgtgcaacgctatcctccttcctcatgtagaagagtttaacctgatcggaaatgcaaaccgcttcagagacattgcaaaggcaatgggtgaaaacattgacggactttccactatggaagcagccagaaaagccattgcagccatccgccagctcagcgagcaggtaggtatcccacagaacctgagaagtcttggagtaaaagaagaagactatgagatcatggctgaaaatgcaatgaaggacgtatgccagctgaccaacccgagaaaggctaccaaagaacaggtaatcggaattttcaaggctgcttattaataagatctgcgggctttatgaaaatggaaatggaaatggtccagtggcaaaaggcatgaaagactgcaaagaaattgcataagaaaggcggaaaataatatggaaaaggcaaagttacaggaacgttatcagttatttatcggaggtcagtggaaagatgcttctgcccatgaaacatttaaaacaatctgcccggcagacggaagcgtattagcagagtgtgcccaggcaacaaaggaagatgtagatgaggcagtaaaagcagcatgggaagcttttaaaacatggaagcatactacagttgcagaaagagccgccgttttaaataagatcgctgccatcattgatgaaaataaggaacatctggctatggtagagtccatggacaacggcaagcccatccgtgagacactggcagtagatatccctatggcagctgaccatttccgctactttgcaggctgcatccaggcagaagagggaagtgccaatattcttggcaaagacaccttaagcctgatcttaagagaaccgatcggcgtagtaggccagatcgttccatggaacttcccatttttaatggcagcatggaaactggctcctgttcttgccagcggctgctgtactgtatttaagacatccagcaccacacctttaagcgttctggaatttgcaagactggtccaggatgtgatccctgcaggcgtatttaacgtgatcaccggttccggctccaaatccggtcagtatatgttagatcatccgggctttagaaaacttgcctttaccggctctacagaagtaggacgaaatgtagctctggcagcagcccagaaactgattcctgctacactggagctgggtggaaaatctgccaatatcttctttgaagactgtgactgggaaatggcaatggacggacttcagatgggcatcctctttaaccagggccaggtttgctgcgcaggttccagagtctttgtccaggaaagcatttatgaccgttttgtagaagaggctgtaaaacgctttaataaagtaaaagtaggtcttccatggaaagaagagacccagatgggaagccagatcgaccgcagacagatggaaaagatcttaaaatatgtggaaattggaaaggaagaaggcgcaaaggtgctttgcggcggtgtacaggcgaaagaaggagaactggaaaaaggctgcttcctgcgtccaaccttattaggagatgtgaccaacgatatgcgcgtagcccaggaagagatctttggaccagttgcatgcatcatcaagtttaaaacagaggaagaagtccttgccatggcaaatgatagtgcctacggcttaggcggtgctgtttggaccagagatatcaacagggcccttcgtgtggcaagaggcgtggaaacaggacgtatgtgggtcaacacctacaatgcgatcccggaaggtgctccatttggcggctgcaaggcatccggtatcggaagagagacccataaggtcatcctggaacattatacccagatgaagaacattatgatcaatatggcagaggcgcctacgggattttatccggcataggatgtaaataaaaaatgatttttttcctttgacattttccaaattgagaaatataataattcctgaacgagtagcaaacaagcgtaaatccagttttgctgctcgtttttttatgcaaaaagagtcaggtggaaagtttaagataaaagcaaaacgaacatacattcgataaagctatagacggatagataaaaatgaggtataataagtccaaaagagtctgcgtaagcgaaaaacttaaatgtaaaagttgatgggaaaggaagtggtaatatgatctatacatgtacatatccgtccccactgggaaatattttactggcggcagatgaggttggactgactggtttatggtttgagggacaaaagtattttgccaaaacacttccaaaagaaaccatttcacaggagacacccgttctgatccaggcgaaaaaatggctggatgtatatttttccgggaaagagccggattttactcctgcacttcatcctgcaggttccccgtttcgccaggctgtatggcagatcttactgcagatcccttatggacagactatgacatatggagagattgcaaaaaagatggcacagatgcaggatgcgcctcatatgtctgcacaggctgtaggcggagcagtaggacataatgaagtttccattatcatcccctgtcatcgtgttgtaggaaccaatggaagtcttaccggatatgccgggggaattgaaaagaagatcgcgctgttagaactggaacatacagatatgagtgggttctttattccaaagaaggggactgccctttaaatggatcttgagatcacagaaaatgataaaagaaaaaggcacaaaaaggatgaaaataaaacagcaaaggcagatcaaagcatttttagtcaacctgtttggaaaaagcagaggagatatgctgtttcgccaacaggaggaactgcttgatacactgatcagaaatacagaaaataagacaaaggatcagatgaaaacgctgactcagacaattttaccccgtatagccctgtacaaggtactgaaccaaagtggtctgtcacaggaggatgtctacaggcatatgcgaaactatatgctggatatcgttggaacagaaaagcatttgtccatggtaaaaatggaacgggtgccgggattttattttctttacagcaatattgtccttcgtgttgtgcgaagaacggatctgtgggacagtgagcaggcccatggaaaggattattttgatgtgacaatgaaaaaatgcctgtggcatacagcctgtttagaaaatggctgtgaaaagctttgtcccctgttttgtgatgttgataatgtaacatatggtggtctgaaaaaactggacttttcccgtactaaaacattaggttacgggggagactgctgtgattttcattttttcaggaaaagatcctgatcgggactgaaaaatgagcatataaaaggcgtgtggatcctggtatggactcatacgccttttgttgctattcatcttgtttccgtatttatgaaaacaagttctcaagatcttggtaaaactgtggataagaaatattcacacattctgccccattgatctgtgtaatgccctctgcgcagagagctgtcactgcaaaggtcatggcaatgcggtggtctaagtggctttcgatcacagcaccgtgaagaggtctgccgccgcggatgatcatgccgtcctctgtttctgttacgtcagctcccatagcacttaaattttccaccataacagcaattcggttggactcttttacctttaattctgctgcatcccggatcacggtcgttccctctgcaaagcaggccatagcagcgatcataggcagttcgtcaataagagtcgggataatgctgccgccgatctctgttccatgaagggaagaagcgcggactaaaagatcagcaaccggttccccttcgtcttcttttacatttaataaagtaaggtctgcacccatagccctgcatacatgaaggatgccgtccctggtaggattgatgcctacatttttgatcaggatctcagagccgggtaccataagtcctgctgcaataaagtaggcagcagaagaaatgtctcctggtacatttacctttacactgtgcagttcactggccggttcaatagtagcagtggtatcttttgtggtcacatgggcgccgaacagatttaacatgatttcagagtgatttctggatacatagggctctgtaacagaggtaggtccctctgcgtaaagtcctgctaataaaatagaagatttaacctgggcagaggctactttggaggtgcagtggatgccgtgaagggcttttccgtggatcgccagaggcgcgcagccattt

SEQ ID NO: 3603 - DNA, 713 bp, Unknown
  gut microbiota DNA sequence
tgatcggtgtcctgatgtcatgagacatgttatttaaaaaggaagtcttagccttattggcactctgtgcttctacaagtgcattttgtaattcctgctgtttttcttcaagctcctgattcagcttcaatgcctgctcagcagacttcttggatttttcttccgcacgttttgattttttcaaaaaatcaagaatgatacacagaacaacgaaaaaagaaattccagcgataagtgatactgtcagtaaattgtcctgaataaaatccttcgctgtaacttttcgtgaggaagcattatacgaaactactgcacctgaaaattgagttgtaggcatagatgtcagtgttttattcagaatggacaaaagaaccggttctccctgctgaatagcaaatggaacatcagcttcttttgtcaggaaaacactatgaagcttattatttttcaaatagtctgaaacagtacctgaattgcttacaatacaatccgtctcccctttctgcattgcttttactgctgcatctgatgtttcatattccacaaccttccattgcggataattgtatgaaagatatgctttcaatgcaaaatcatctttttcaacggcaactatattctctttattttcatcaaaagaatcctttgccgtaattgctgccatattgagagtcaatagcgtatccgacaaagcaaatccatttgtttctgca

SEQ ID NO: 3604 - DNA, 197 bp, Unknown
  gut microbiota DNA sequence
taaggagtcacaccatccattggttttaaaatgccataaaacgcagacaggattcttaaatgattttgcaaatactcaaactgctggatttcaaacaccgatggtgccatatattgaaatgcaatcccttcatatgctaaaacagccggagtaagcctgttataaagatccatattttccaatctgttaaagttctg

SEQ ID NO: 3605 - DNA, 826 bp, Unknown
  gut microbiota DNA sequence
tatttccccttaacgtaaaagagaaacctttgtatcaaaggtttctccatagttctcataaaactggtttcattatggtgctttgccaccaaatcacaggcatttcacctatccggcttgattatcctctggctgaagagtaagcgcaaagttttaacgttgccagcgcaacggaagcaaacaccttatgcttcgtgtcctgaaatcaggaagagatttctctcttggtacttatattatactcagcatctccgaaaatagcaatctttttttaattttatgactgcaagattagtgattctttgtccttccaacgcaattgcagacgcactgttgcatggcctactactatctttctagtttacatctccgattttacatgagattttccgacaaaagcaaatacatctgctacctcttcttgctttattgttgctaattcacttctcctggttaaagtcgtaaaccattccggcacataaaaatttatcttgggattgttttccctgtaccattgaatttgtttccttgcaaattttaaaaatccggggtctgaatgtaatctcgccagctcttttttacttaattttcctattgttcgttttctttcactgcccgtcggataaatatctccagtccatgcatccaaacgatatcccgttccctgcgcatgagcatgaggcactgaaggtttatcatctgcatcgcctattgtgaaaatccatatacagtcttgtaatttttcacgcggtgaatatagctgcggcccgggcacttttttcattcgtattattttactacgcgatctcaccgtatttcttctaat

SEQ ID NO: 3606 - DNA, 8651 bp, Unknown
  gut microbiota DNA sequence
aatatggtgaagaaagatccgtccgcagtggacgttagatttgccatgtgtttcccggacgtatacgagataggcatgtcccatttaggcatccagattctgtattccatgtttaattccagggaagatatttattgtgagcgtgtatacagcccctggatggatctggatccgatcatgagggagaagaatatcccgctgtttactcttgagacccaggagcctgtaaagaactttgattttctgggaatcactcttcagtatgaaatgtgttataccaatgtgcttcagatcttagacttggcacagatcccgctccatgcagcagaccgtggggaagatatgccaattgtcatcggaggcggtccatgtgcctataatccggagcctttagcagatttctttgatatgttctatatcggagaaggtgagacagtttactttgaacttttggactgctataaggaaaacaagaagaacggcggcaacagaagagactttttagagaaagcagcccagatcgagggaatctatgtcccggccttttatgacgtagagtacaatgaagatggcacattaaaaagctttacaccaaattgtccaactgcaaaggaaaagatcgttaagcaggtagtagcagatatggacagcgtgccatatattgaaaagccgctggtgccgtttattaaggtgactcaggaccgagtggttttagagatccagagaggctgcatccgcggatgtcgtttctgccaggctggtaatgtgtaccgcccgttaagagagcacagtctggaatatttaaagcactacgcctacgatatgcttaagagtaccggacacgaggaaatatccttaagttctttaagttccagtgactatacccacctggaaggccttgtaaatttcctgattgatgagtttaagggcaaaggagtaaatatttcccttccgtccctgcgtattgatgcgttctccctggatgttatgagcaaggtccaggatattaaaaagagcagccttacctttgcgccagaggcaggttcccagcgccagagagatgttattaataagggccttacggaagaagtgatcttaaaaggtgccagtgatgctttccatgcaggctggaaccgtgtaaaactgtactttatgttaggacagcctacagagaccgtggaagatatggaagggatcgcccttctttctgagaagatcgcagagacttactatgatgagattccgaaagatcagagacatggtaaagtccaggtagttgccagctcctctttctttgttccaaagccatttaccccattccagtgggcaagaatgtgtaccaaggaagagttcttagagcgtgccaatatcgtccgcggcaagttccgtgaaatgaagaactttaagagtttaaaatataactggcatgaagcagaactgactgttttagagggtgttcttgcaagaggcgaccgccgtgtaggcgctgtgatcgaagaagcataccgcaaaggcgctatctatgattcctggtccgagttctttaaaaatgaagtctggatggaagcatttaagacctgcggcgtggatattgatttttacaccaccagagagcgcagcttagacgagctgttcccatgggatttcattgatgccggtgtttccaaaaatttcttaaagagagagtggcagaatgcgcttgatgaaaaagtgactccaaactgtcgtcagaaatgttctggctgcggtgctgccaaatacggcggcggtgtctgctttgagaaacgataagatcgcaaatagtgcaaattaacagattaatgtaaatataaaggaacaaaacaaacaatgatgaaaattcgtataaaatttcgtaagtacggcaccatgaaattcatcggccatctggatgttatgcgttacttccagaaggcgatccgccgatcagaggttaatatccgttacagtgagggcttcagtcctcaccagatcatgtcctttgcggcacctttaggtgtaggtatcaccagtaaaggcgaatatgtggatattgaggtgttagatactgaaaattcaaaaaagatgatcgaccgcttaaatgcagtgatgtcagaaggctttgagattctggagtacaagcttcttcctgacgatgcagccaatgccatgtctatcgttgcagctgccgactacagtcttgttttccgccctggttatgaaccggaaaaggaaagcccggaagaatggtttgagaaactggtccgtttttttgacgctgatcatgtgatgatcatgaaaaagacaaaaaaaggcgagagagaaatggatttaaagccttttgtctatgaactgaacgtgcgtaaaaatggggaggttcctgcgctctttatgaaggtgtctgcaggcagtgctgcaaacattaaaccggagcttgttttagatgcatactatgcttctttaggagaagaacgtcctcagtttgcttttatgacagagagagaagaagtttatgcagatacagccacagcagaagaagctgaggctggcacacataaatttgtgacacttggagatctgggacaggatatagaataatggataaattagtcattacccgtttgcagggaaaaatatgtacagcttctgtttctgacagaaaggtgacaggtatcaccctggaagaggaagataaggcatctatccttaataatatttacattggaaaggtccagaaggtagttacaggcattaacgcagcctttgttgatctgggcgtgaccattggctattatagtctggatgaaaataaagaacatttatttacccagcagggaagaaacggtaaattaaggcccggagatgagattttagtccaggtaagccgggatgcggtaaaaacaaaagcaccggtgcttactgctaatctgtccctgcctgggcgcttttgcgttcttacagctggaaaaacaggcattggtttttctgcaaaactcaccgatacaacctggaaaaaccagatccggaaaatactgccggaaaaagagtttgaagattttggcattattataaggaccaatgccagatccggtgatccggaacagatcttagaagagtgcgaaacattaaaaatcagactgaagcagctattgaaggaaagttccagccgtacctgctacagctgtctgtacaaaaatcttcctgcctatattacaggcatccgcgactcttatgcaggcaaactggaggagatcatcacagattgtcctgatctctatgaccagctaaaagagtatctggaaaacagccagaaggaagatgcggaaaaattaaaactgtatacagatgatctgctttctcttggaaagctttacagtctggaaaatgctctttcaaaggcacttgataaacgggtatggctgaagtccggtggctatctggtgatcgagccaacagaagccatggtagtgatcgatgtaaatacgggcaaatacgaaggcaaaaagaagctggaagaaaccgtattaaagattaatttagaggcagcagcagaaattgcaagacagttgcgtctgcgcaacctttctggtattattatggtggattttattgatatgaaccaggaagcaaacaaagaagcgttaatggacgctttacgggcagctgtcgcaaaagacccggtaaaaacagttgtagtagaaatgacccgtctgaatttagtggagatcacccgtaaaaagttgagaagaccactgtatgaacaggtggctaacagtacaagggaataggggaaaacaaacatgaagatcataattgtaggctgcggtaaagtaggaactactctggcagaacagttaaacagagaaaaccatgacatcacactgatcgataccgatgatgaggcattgaaaaatatttctgacaatgtggatctgatgagtgtaacaggaaatggtgcgatttatcaggtacagatggaggcaggcatccaggaggcagatctgatgattgccaccactaactcagatgaattgaacatgctctgctgtctgatcgcaaaaaaagcaggtaactgccataccattgcacgtatccgtaatcctgaatattccgcggagatcggctatatcagagaggaattaaacctttccatggccattaacccggaactggcagctgcgagagaaatcgcaagacttctgcgttttccgtctgctattaagatcgagccgtttgctaaaggaaggatcgagctgttaaagcttctcatcccggatcattccaatttagaccagttaaaggtcatggatgtggtaaataagttaaagagcaatgtgttgatctgtgctgtagagcgcggggatgacgttgtgatcccggatggtaattttgtgatgcagaaaggagacaagatctcatttatcgcatcccatacagacagtgcggacttctttaagaaagccggaatcgtaaacaactccgtaaaaactgccatgtttgtaggcggtggaaagctgacatattatctttgcaaccagctggcggatacaaagatcaagatcaagatcattgagcaggatgaagtacggtgcagacagttaagtgaactgctgccaaatgccatgatcatccacggtgacggttctgaccagcaggttttattggaagaaggtatccttcagacagaggcttttgcttctttaacaggctttgatgaagaaaatatcatgctttccctgtatgcagccagcaaatccaatgcaaagctgatcacgaaggtaaacaggattgcttttgaaagtgtgatcaattccctgaatcttggaagcctgatccagccgaaaatgcttactgcagacctgatccttcagtatgtaagagcaatgcagaattctatgggaagcaatgtagaaactctttataagatcgtagctgacaaggcagaggcgttggaattccgcgtaaaagaaggatcccctcttcttggtattccgttggaaaggctgcaactgaaaaataatctgttagtagcctgtatcaaccgcagcggctgtattattacccctcgaggcaaagatacgattgaagctggcgatactgtgatcattgttacgacccatacaggcctgaatgatctgaccgacatattaaagtaaaggggtttaggcaatgaatcatagtattattatttatatgttaggctggatcatgaatatagaagcggcgctgatgctgatccctatcctgacagcagtcgtttataaagaaggaattatcagctgttacgcaggggtagcagttgtatgtgcagttcttggttttttatgtaccagaaaaaagccaaaggtaaggatgttttttgcaagggaaggctttgtactggtttccttaggctggctggttctaagcttttttggctgccttccttttgtgttaagcggggagatacctcattttattgatgctttgtttgaaattgtgtccggttttactactaccggttctagtatccttccagaggtggagaagctgtcaaaagccagcctgatctggagaagtttttcccactggatcggaggcatgggcgttcttgtatttatccttgctattcttcccatggcaggagactatgatatgcacatcatgagagcagaaagtccgggaccttctgtagggaaactggtaccgaagatccgtattactgcaaaacttttgtatatcatctatttctgtattacagtggcaacggctgttttcttattaattggaaaaatgcctgtatttgatactatctgtatgagccttggcgcagcaggtacaggaggttttgcctgccgaaacagcggccaggcgggatatacggtataccagcaggcagttttaagtattgccatgatcctttttggcattaactttaacgtatattacctgcttctcatccgcaaaccaaaagaagcatttaagtgtgaggaaatgcgtggatatctggcgatcatcctgatcgcagtggtactgattactgttaatatccgctccatgttcccgtcccttttcctggctgcccatcacgcattattccaggttgcttctattattacaactacaggttattccactgtggattttgataaatggccggaattttcaaaatgcattatcgtactgttaatgttcatcggtgcctgcgccggaagtacaggcggcggaatgaaggtttcacgtattatgatcgcatttaaagaagccaaacgggaaatctctactatgatccacccaagaagtgtaaaggtcttaaaatatgaaggaaaagtgatcggaaatgatactcttcgtgttttaaactgctatatcatcgtatattttatgctgtttgtagcgtcggtccttattgtcagcctggataattacgattttaccaccagctttacagcagtagcagcaaacttcaacaatattggaccgggactttccgttgtaggacctgcttccaatttctccatgatgtcctatctgtcaaaatccgtgctgatctttgatatgctggcaggaagactggagctgttcccggtacttgtccttctttctcctggaacctggaagagaggataaaaacagccctataaaatatattggcgcagtccaaaaaaagcagtccaaaaaaattaaaaatgtccttgacatttgaaaagtcgggtgctattatacttgagtatgccgcacagcgaggtaaaagatttcgcaaagaaacaccgaagctggcgagtaatgaacataggaggtgcctttttatgtacgcgattattgcaacaggcggaaagcagtacaaggtagcagaaggcgatgtcattaaggtagaaagactgggcgcaggcgcaggcgagaccgtaacatttgaccaggtgctggctgttaacaacggcgaactgcagattggatgcccaaccgtagccggagcaactgttacagcaacagttgagaaggaaggcaagggaaagaaagttatcgtttacaagtataagagaaaaactggctatcacaaaaagaacggccacagacagctctttacacaggttaagatcgaaaagatcaacgcttaattgtaaatggtatgatccagacgacagtatttaagaaatccacagattcaggcaatgatctttactgcgggatcgtgattaaagggcatgcaggttatgctgaagaaggtgaggatatcatctgcgcagcagtttctgcactggctattaatttttataattcagtagagacatttacggatgacggatttgaagggatagcaggacaggaagacgttcagtttgacttccgctttacttcagatataagccctgagtcacagctccttatgaattctcttgttctgggacttcagaatattgagaatgattatggaaaatcatacattaatatccgatttaaggaggtgtaagacatgttaaagatgaaccttcagttattcgctcataaaaagggtgttggttctactaagaacggccgtgattccgagtccaagagacttggcgcaaagagagctgatggacagttcgtactggcaggaaacatcctgtacagacagcgcggtacacatattcatcctggcaacaacgtaggtaagggcggcgacgataccttatttgctttagtagacggagttgttaagtttgaaagaaagggcagagacaagaaacaggtttctgtttacccaagagcaatcaacgagtaattctgagggccccatacgaatatgtatggagccccttttttctgtatcctcagtggtaaaagcatagtttggttactggggatcttcacattcaacaccaacaggaggtgctgtataatgtttgcagatagagcaaaagtatttataaagtccggtaaaggcggagacggccatgtttctttcagaagagaactgtatgttcctaatggcggtcctgacggcggagacggcggaagaggcggcgatgttattttccaggtagataccggaaaaaacacactggtagatttccgtcacatccataaatatgtggcaaaagacggacaggaaggcggaaagcgccgctgtcacggagcagatgccgatgatctgatcgtaaaagtaccagaaggtactgtaattaaagattttgaatccggaaaagtcattgcagatatgtccggtgataataaaagagaagttattttaaaaggcggaaaaggcggccttggcaacatgcatttcgcaacctccaccatgcaggttcccaagtatgcacagcctggacagcctggacaggaactgtgggtcaccctggagcttaaggtgatcgcagacgtaggtctggtaggatttccaaatgttggaaaatctactttattatctgtagtcagcaacgcaagacctgagatcgcaaactatcattttaccaccttaaatccacatctgggtgtggtagatctgggtgatggcgcaggttttgttatggcagatatcccgggattgatcgagggagcttctgagggagtaggactggggcattccttcctgcgtcatattgagcgtaccaaggtgttagtccatgtagtagacggtgcttctgtagaaggaagagatccattagaggatattttaactattaacaaagagc

SEQ ID NO: 3607 - DNA, 22892 bp, Unknown
  gut microbiota DNA sequence
ttaaaggcagaatttgagccaaagggtattaaagtattccctatctctgcagtcagcagacagggcgtaaaagagctgttatggcatgtaaatgacctgttaaagactgtagattctgcaccggttgttttccagaaggaatttgagatcgagtatcagggtgaccgcagccttccgtatacagttacaagagcagatgacggtgcttatgtagtagaaggaccgagaattgaaaagatgctgggttatacgaacctggattctgagaagggctttgatttcttccagaaattcttaaaaaataccggtattttagaagaccttgaaaaggccggtatcagtgaaggtgacactgtccgtatgtatggactggagtttgattattacaaataaaatgtgactattgatcgtattcgtttatatagataaaggagaaaccaatgacaagtaagcagagatcctatttaaaaggtcttgcaatgaacctggatccgatcttccagatcggtaagtccagccttacaccagaagtgacacaggctgtttctgaagcattagaagccagagaacttgtaaagatcactgtattaaagaactgtctggatgatggcagatcgatcgcagaagtactgggcgagcgtactcattcagaagtagtacaggtgatcggaagaaagatcgtactgtatcgtccggcaaaggatgagacaaagagaaagatcgtattaccttaatcacagatgatcgcagaggtttgacatggcaaaaataggaattttgggaggaacctttgatcctgtccataatggccatcttgcccttgggaaacaggcatatgagcagtttaaactggatgagatctggtttatgccatccggccatcctcctcacaagaagagccgtctggtgacgcaaggaaaagaacgggaagatatggttaagctggcaattgcgtcagtttcctattttgtatattccgattttgaattaaaaagggaaggaaacacctatacagcgcagacattaacattgctcagggaagcttatccccagcatgagttctattttatcataggtgcagactccctttatgagatcgaacagtggtatcatccggaactggtgataaaacaggcagttttactggcagcagcaagaccctatgaaaaagaacatccaaattttgaaaagcaggtaaaatatctgcaggaaaaatttgatgccaggatcggagtgatacgttttgaagaaatggatgtatcctccagacagatacgaaaagcagttgcgctgggacaatctattaaagatctggttccaggtccggttgccggatatatcaggatacatggactttacagagaagcctttgaagattaaaggagcgagacagttatgcagatgagcaatcattgcagccagatcatgatgctgcgcagtaaactgaaaacaaaactggatcctatgcgttatgaacattcactcagcgtatcttttacctgtatgaatcttgccatgcgttatggatatgatatagataaggcagaacttgcaggactgatgcatgactgcggtaagcgttttgcagatgagattatcttaaagaaatgtatcagccacaaaattcctgtgactgatgcagaaatgaaggcacttccggtacttcacgccaagtacggtgcctggctggctgaaaataaatatgggatcgaagatccggagatcataagtgccattgcctgtcatacaacaggtaaggcggacatgtccgttctggataagatcgtatatattgcagattatattgaaccaagacgctataaagcggataatctgcctcagatgagaaggcttgcctatgaagacctggatcagaccatgtatgaaatattaaaaagtacactggaatatcttgcaaagaagggcgcagatgctgatcctatgaccgctacagcttatgagtacttcaagcagctggtagcagccgaaaagtaaaaggagaaatagaatgaattctaaggaaatggtaaagatcgcctacgaggcgttaagtgataaaaagggccaggatatcaagatcatcgatatccagtctgtatctgttcttgctgattatttcatcattgcagacggaagcaacccaaaccaggtacaggcaatggctgacaatgtagaagagatgcttggcaaagcaggctgcgaatgcaaacagatcgaaggctatcagagtgcaaactggattcttatggactacaaagatattatcgtgcatattttctgccgcgaagaccgtctgttctatgatctggagcgtatctggagagatggaaagacatttgtggatgtaaatgagattgattaaatgtttgtttaattccttttatttcgcgaacattccctctaatcacgaacaagggataaaataagtgtgaaaaattccttttatatcacgaacagaaagggaaaaacctgcaaatggtttttcccttttatcgtgaataagagataaaaatgatgtggtataaaaaaagttgacacctcattctcaaggatttgagatataatcaagaggataaggagagtggacaaaatggcaggaaacagacaatatgaccatgaatacaaagtacaggcggtgaaactcgctaaagaaatcggacaagctaagacagctaaagaactgggagtgccagggaataccctgtatggctgggtacatgcgaaccgtcttgacaatcttgatcttggagctggctcacagaatccacaaagtgccatgacgcttaatgaagaacttttaaggctccgtcaacaggtaaaggaattggagaaggaaatcagacttttaaagaaagaaaacgactttcttgaggaagccagtgcttttttcgccgcgagccgtctgaagtcagcaaaaacgaaagaatgaagtttattgcattaaaaacaaaagacggcagctccaaaggaaatattacctttttctgcagggttctccatgtcagcagacagggatattaccagtatcttgtcatgaaagaccgcccatggaaatatcagccactggcagatgccatgaaagatatacttacagaagatatctgcaatgatacgtatggccgtacccgcatgtatcaggcattgacgatgaaacagccgaaaaatgtggatattcccagtgaacgcactgtttaccgtgtaatggaagagattgggatcagtcatcatcccagacgcaaaccgaacgggatcacgaaagcggacagggaagccagaaaatcagaggatctgttaaagcgtgatttccaagcagaagaacggctgacaaaatgtgttacagatatgacagagatcaaaggctgtgatgggaaactgtatgtttcagccatttttgactgctttgattccagcgtgatcggtttggcaatggatacaaatatgaaagcctctttatgtaaagagacactggaaaatgctgctaaagcgtatcctagtatccgtggagtcattatccattcagacaggggaagccagtataccagccagctttaccgggaagcgatacagaaatatggaatacaacaaagtatgaacagcgcaggtggcaggtgccacgataatgcccggtgtgagagcatgtgggcaagaatgaaaacagaactgctatatgatcgttatgatacagagaaaatgactacggatgaacttaagacaatcatctggagatatttcaccagttactggaataacaggaggatctgctccactaatagaggtcttcccccaatgatcaaaagacaacaatattacgcttccctgaaggaagcagcatagggttcaaaagccttgaggaaaatgtgtcaactaatattgacaatatcaaagaaactcttccagtttgtctgtttggtaaataaaaggaaggaaagaaacaataaaagagcaggcatgaaataggagcaatatcaatttcagacctgcttttgactttatagattcatttattcaagcatttcctgtgctttcaacaggttccgcaggcaatagtaaaaggccggaatcagaaaggcgtctgccataagccacgcaagaggagaagcgaagcatatgataatgtagccgaagatgggaaccagtgcaaatccaaccaaagcccgggcgatcatctcgcagacaccggcgagaatggcaagaagactgtagcccattccctgaatggtaaaacgccatacattgacgatggtaagcggaatataaaacagagaattaaaggttaaaaactggtgagcctgatgaattacaactgtctccgaagcatctacaaagagcagtgggatcacaccgccgaatagggtcaggacaatgcaggccagaaccgagtagatgcttccaatgaaggttgcagaacgaactccctggcggatacggtcagttttcccggcaccggcattctgtccggcataggttgccatcgtgcctcccagtgcatcaaaggggcagcagaagaacataccgattttctgaccggcagtaaccgaggcaaccgcaatggaaccgagagagttgatggcggtctggatcaccaccgaaccgatggcagtgatggagtattgaagtcccatgggaatacccatcatgcagagacgatagaggtggtaggtactgattcgtgtttcctcccgatgcatttttaaaatatcaaatttcttcttcatatagatcaggcagagaatgccggaaacagcctgtgcgatcaccgtagcataagcagcaccggctgttccggttcctatctgtacgatgaaaaacagatccagtacgatatttaagagactggataaaatcagaaaataaacaggtgtcctggagtctcccagtgcacggatgataccggctaaggtattgtacagatacgtggccggaataccggcaaacacaaagaagatatagctgtaggcaccgtcgatgatattgtccggtgtctgcatccagacaaggatctgacgggtcatcagacagacgattacggtcataaccacagcgaaaaaagatgccagccatccggcattggcaacgaaacgccgcatgtccttataatcctgggcgccgaaccgctgagcaaccggaatagagaatccggtgcatacaccgattacaaagccattgatcataaagttgatagcggctgtggagccaacggaagccagggcatccacgcccagaaactttcctacaataatggtatcaaccatgctgtaaaattgctgaaacaaaagccccatcagcatgggaatggcgaatccaagaatcaatttagcagggcttccagttgtcatatctttaatggtagattgttttgcagattggctcataaagcagtctcccttcttttacaaatcaaacaagtatagctgaatccgaaatcacatggaattgatcaaaaaatctcaaacataaattttataagaaagatggaaaattggcaattcataaaagtcacgaaaaattggaacgataaaagaaaaaatttggaataagaagcattggaaaaatcttctgatttcaaccgaattgtagctacaggaatatgactaatgctttatttttatgaatgttcctcactttatcgctaactaaatgactttgatgactgaattgtaaccaattttgttatgattggtactagtgagtcagtcttttctatgttacaatatatacgttatcaagaaacacggtcctgaatcatggaggcacaaactatggaaccaatgtatttgtcgatccaaccggaaaagactggagaacgcataaaaaagctgcttttggaacagggatatacgattcgggagatccagggagctttcggatttgagaatccgcaggctatttataaatggctgtccggcaaatcgttacccagcatagacaattttgttattttaagtagattattacatactacgattgaagatatcctcgtcattgacggggatattcctcatttatggggaattttaaaccgatggttgaatgacatctgccaccgaatgatttacaatcggatcagaagtaaatgacggaagatgaggatagagaggaaggcgaaaatcatgcagaaaattacatcggcttatgcaaataagatgctgagaagccttgaggaagacaaagcattctgggtaaacaaggaagcatcatccagtacttacgtcgctgctgtcaatgaggagccggtcattccggaatacaattacatgacagttgcgcatacaattgatgagatagacaggaagatcatcattatcaaacacgcattgaacctgaccaatgccacagcaaaggtgcagataggtgaacaggagatgagcattgacagtattctggttcgaatggctcagctcaataagagaaaggctgttcttgacgatatgcgtaagagactgccaaaaacgcgtgtgtatggcagtgcatttagctcatctggttcagcgcctgagtataagtatatcaactacgatccggaactgatccggcaggaatatgaccgtatttccaatatgatcatggacatgcagatcgcactggatcgctataaccagacggtgttgtttgaggtagatatctgatcactcattccgtgcaggacatatttctaacaatacttactggcggttacggttcatagttatcgtttatcggttatttgttatggggttatgtgttcaggttcatggaaacgacttttggaaagcatataatgcagattttcaaaatgtcctgtaaaaacctgtgagagatcacggtgccaaggtacggttttcaggcacgatggctgtgggagcaattccgcagccattttttatggtaagaaaagccaccgtatagtttcggattttagaaaccgtacagtggctttttggtgaaaaatgttttataagtcaggttaaacttgcggatacgcacattacatcattcttataagtccaataaccttgccaaggatctctacatgatctgtgataataggatccatggtatcattttcaggctgtaggcggtagtggtctttttccttgaagaaacgttttacagtagcggagtcgtctaaaagggcaaccacgatctccccattttcagcagttggacactgttccacgatcagctgatccccaggaaggatacctgcgtttaccatactttcaccttttacatgaagcataaaggtctctgcgtttggaagagactctgccgggaacggaaaataactttcgatatgttcctctgcaaggatcggttctccggctgcaaccgtaccgatcacagggatgttcaccatttctttccggttaaaattaaaagtatcatccaggatctcaattgctctcggcttggtaggatcacgatggatatatcctttttcttccagagctgacagatgagaatggacagaagaagtggactttaatttcacagcttcgcagatgtcacggacagctggtggatatcccttctttaagatcgtattctttatgtattctaaaatttcctgttgtttcgcagtaagtttatcctgggccatgaaagttcccccttctgttttgtaataatcttttactgatactatagtaacatatgttcgataaaaatgcaaacctttgttcgattttttgcgttcacgccattgacaaacatatgttctgatgttatagtatagacacgatgagaacaaatgttcgtatctgtgttggacgagtatacaaatgagtaggaggaaacgttatgaggagaagaagattagtaagaaaacggtttttaacagggtgttttattatgcttctgtttgttgctattctcacaggacggagtatgcttacatcaatggcagaagaagaacctatgactgtcagtccctattataagagcgtcgagatcaaagacggggataatttgtggaatatcgccagacagtacaaaaagggaagccgtatgtctacagaagaatacatcagggaattaaaacgaatgaattcccttcgctctgatacgattcataaaggccagtttcttacaatcgtttattataagtagatcacggaagtttttgaattttcctgaaaaatgtacattgaaaacatcatattgggaatactgagcttaatgagaaatgttttaattgagaaaagttacctgtaacactacttgttttttccaattttatctgatacgatatacaaggatgttagctaagactaacttatattttaacagttgtaaatgaggtatcctatgagtaaagaaacccttgatctgatgcttggcttaaacaggcaggaactggagatccagatcgcacttcagtgtgcaccattgcttacaggacgtaagatatccaatcttcttactgtagacaagagatttcgcagcgcagtattgcggttgttccgttccagtgctgtttcctgctatgtcctttatgagtctgatgaccgtattacttttcttttatatgtacgtgaaaaactggaagcttatttaagaacagagaaggtgaaaaagctgatggaagagtttggatgcagcggatgtatgctttccaagatcctctatcgcgtatcagaacgctaccgtgctcacatggaaggcaaaggtgattttcctcatgagatcggattactccttggatatccgccggaagatgtcattggttttattgaaaaccggggacaaaatccgctgtatatcggatactggaaggtatattccaatctggaagaatgccggaaggtatttgccggatacgatcaggcaagggaaaaagtgatccatatggtatcatcaggaatgactgttaaaaacatcatggagctgtatgatttacattcacgtaaattaatggcagtataggaggaagaaaaaaatggacgaaatcatggtagtttactggtcacagacaggcaacacagaggctatggcacaggcagtagcacagggaattgaagaagctggaaagaaagcaaaactggctgaagtatctgcagtatctgcagctgacctgaaggatgcaaaagcatttgcattaggatgccctgcaatgggagctgaagttatcgaagaagatgagatggaaccattcgtagctgaggtagaaggatttgcatcaggaaagaccatcggtctgtttggctcttatggctggggtgatggacagtggatgcgtgactgggaagaccgtatgaaggcagcaggcgcagaagttgcatgcggagaaggcattattacccaggaaactccagatgatgatgcattagttaagtgtaaggaattaggaaagacactggcagcagtttaatcttattttaaagtaaataactgcatataaatctattaccgcaaagcaggcagtaaaatgtttcctgttttgcggtatttttgtttgttgataccatggtcatttacagaatcagaaaaaacatctataataccattcagtgtaaaaaatgcaaaagaggagaagcagttatatggatatcaaaaaacagtttatccgctatgtatcccagaatatgttaggcatgctgggtatgtccttgtatattcttgcagatacttattttatatcaaaagcagtaggagctgatggtattacagcattaaatttggtacttcctgtatataatctgatctttgccattggagctatgatcggtgtaggttctgctatccgttttgtgatagagagaaataagaaaaatccagaggcagaaagctatttctttcatgcactgctctgggccggtatcatcagtcttatatttattgcagccggtatcttctacccagaccaggtgatcaggcttatgggtggagatgaacagatcatagcaacaggaagaagctatacccgcatttttatgacatttgccccactatttatgtggaatcatatatgtaatgcctttgtacgaaatgatggaagccctatgatcgctatgatggctacactgtttagcagtctgtttaacattgtattcgactatattctgatgttcccatttggtatggatatgccgggagcagcccttgcaacagctctttcaccagtagtaggtattttaatctgtcagctgcattttcgttcaaaaaagtgtaccgtatcttttttgccggtaataccatcgttaaaaaggcttattttttcctgtcaggtgggagtttctgcttttgtaggagagatatcttccggtgtgatcactacagcttttaatttgatcatattgcggttggctggaaataccggtgttgcagcctatggtgtagtagccaatatctctctggtggcagtagctctgtttaacggcatatcccagggctcccagcctctgcttagcagtttctatggacaggcagataaaaaggctttagagaaagtaataggccttagtttaaggacagcagcagttacggctgtatgtatatatgcagtgatctatttgtggtcggaaccaattgctggtatttttaaccaggaacataacgaagaactggcggctatggctagatttggtctgaagttgtattttattggtttcttttttgccggtatcaatatagtaggaacaggcatattaagtgcggtagagtcagttaaatgggcatttacagcttccatttcccgtggttttgttatgatccttctttcggcctttactatgtctgcagtttgggggatgacaggtatatggctggcttttccggcagcagaatttattactatgggaatgactctcgcaggtatttggggatttttttctaaagtaaatcttgttgggaaatccctataagaaggctataggaagtctttttgagaaatcgttaaaattgactttctgtgaattataatctataatatgggaggagaaagtcaaaagaagtggttaggggtagggaagttacaaaaattcaagtgtaattcacaagtccagaaaaatcttctgggcctttttttgccttttagccagttcttatatcggtattataaaatgttttcccggagtctcttctcacaaaatcgggcacaggaagattccggcagaacataaaaaggagaaggaggggcagtaaaatcataaccggttattttgacttgctcctaagagaaaaagaggctgtcacaagatgacagcagaatgggagtttacaaatgattcatgacggttttatctatcttggcactttgatgctgcttgcagcgattttagtcaatcttcctgtatacctgaagggaaaaggcgcacagaaattttttaagtttgcaccgcctattgttttgctctacttaggtatgatgcttttatgtactatgaaaatgtggaacctggaagatacagctgcaacttataaggcagtaaaaaacccactgctgtatgcaatgttgtttttaatgctgctgcgttgtgatcttaagaagatcatcaaattaggaccgaaaatgcttattggtttctttgcagccagcctttctatctgtactggttttatagtaagttatgctattttccataaaatgttaggtccggacagctggaaagcgctgggggcattgtgtggaagctggttaggcggaagtggaaatatgctggctgtacaggcggttttagatgtaagtgaggaaagcatggcatattcactggtaatcgactctgtttgtgcggtaatgtatgttatgttccttctgtgggtcattaacttttcaaaggaatttaacgcatggaccaaagcagatgtacgtctgattaatgaagttggcgcttccctggaagaggaggcaaaagcgaacaccaaacctcttacatggaagagcatgcttcttttagttggagtatctttcttcatttctgctatttccaaggatgtaggaagtatggttgcaaatgcactgcctgtttttgacagtgcaacctggactgttcttctggtaactgctgtaggcctgctggtggctatgactccatttggaaaattaaaaggaacagaagaggtatctaatatcatcctttatgttgagattgccctgatcgcttccagagcagatatttctgctatgggtaatgcacctgtgtggctggcagccggcttcctgatccttctgatccatgtagctgttatggtcattcttgcaaaggtgatcaaaatggatatctttacctgtgccgttgcatctttagcaaacgttggtggaactgctactgcacctgtacttgcaggcgcatacagtagtgctttagttccggtaggtattcttatggcacttctgggtaatattattggtacaccgggaggagcatttgtgggacatttaatgagtctgattggatagtagtctctgtcagataaggcagataagtaaaaaggtattccgggatcatgaaaaatgatctgcggaataccttttttaattcacgccttgaagatttttctatttttttgcttaaaaagtgtcatatggtaattagtttgatataataggtgctgcaaataaatgccaggaaatgaaagaaatacagttattaaagaggaaatgatatgaagcatgaggaattactttcaaaattaacaccggaggaaaaggcagctcttttaagcggcaaaacagtatggcagacccgggacattccacgccttaagatcccgtccattttcctttctgacggtcctcacggcatccgcaaacaggcaggagccggggatcatttgggattaaatgcctctttaaaggcaacctgttttcctacagcggcgactatcgctaacagctgggatccggaccttggggaagagattggaaaagcactgggagaagaggcagcagcccaggatgtcaatatcgtactgggaccggggcttaatatgaaaagaagtcctctttgcggaagaaactttgaatatttttccgaagatccttatcttgcaggaaaaatggcagctgcttatgtgcggggcatccagagccagggagtgtatgcatgccccaaacattttgcagtaaacagccaggaagagcggcgcatggctatggatgcagtggtagatgaacggactcttagggagatctacctgactggttttgagattgcagtaaaagagggacatgccaaagccattatgaccagctacaatgaggtaaatgaagaatatgccaatgaaaataaaaagcttctggtagacattttacgaaaggaatggggctttgacggactggtagttactgactggggtggttctaatgaccatgtaaaaggggtcatgtgccagtcagatctggaaatgccggcaccggggctttcttccgccagggagttagttacagccgtaaaagaaggctgtctttccatggaagctttcgatctctgtgtagatcaggtcttagatgcggtactaaatcttagcaaaaaagaggaaacaaaaaagacagattttgatcaaaagtcccaccatgcattagcaaaaagggcagcagcagaaagtgcggtgcttttaaagaatgagggaaatatccttccattaaaagaaaaaacaaaggtggctctcattggtgattttgcctttgttccacgttatcagggcgccggctcttctatggtaaatccttttgaagtagagtctatggaccagctgatccatgagtatgacctgcaggtagtaagtaaggttcatggatatacccgtgatggggaaccggatgcagctttggaaaaagaagccttggaagcagctgccggggcagaggtggttctttactgttttggacttgatgagatcagcgagtcagaggggaaagaccgtgaacacatgcgcctgccacaaaatcagatccggctgttaaatgaattagtaaaggtaaatgaaaatattgtgggtattttaagtgccggatccagtattgaaatgccttggcagcactgtttaaaggcgattcttcatggctatctgggcggagaagcaggtgccggtgcgatcctggatatccttacaggaaaaataaatccttccggccgcctggctgaagcctaccctctgcggtatgaggatactcctgcattccggtattatcctgcttcagaacgtacatcagagtaccgggaaggaccttttataggataccgctattatgataccagcctggtccgcttccagtatccctttggatatggactttcttatacagagtttgcctattcagccctgaaagcagacgaaaatggggtacagtttactgttacaaatgttggagaacgggacggggcagaggttgcccagttttatatcggacttccggactctgccgtattccgcccaggaaaggaattaaaaggctttcagaaggtatttttaaaggccggagagagcaaaacagtgcatattccatttgatgataaaactttccgttactggaatgtaaaaacaggacgctgggaagtggaagagggcgaatatctgatcatggtaggtgcctgcgtggcagatatccgtctgtccggaaagctatggatagcgggaaccacaagtaaaatgccttatgagaaagaaaaactcccgtcctattacagcgggctgatcaacaatgtaggggcagaagaatttgagacacttctggggcatcctgcgccttccggtaaatggcagggcgaactggaacttaatgatgctatctgccagatgtattatgccaaaagccgtctggcccgtctggtttaccgtatactggccgataaaaagaaaaagagcgaggacaaaggcaaaccggacttaaatgtattatttatctataacatgccatttcgcgggatcgcaaaaatgacaggcggtgccgtaagcatggaaatggtaaatgggatcgttgatatggtaaatggtaaatggggctctggttttagaaaagtagtgaaaggctattttcataataagagagaaaacagaaagtacgaaaaacttctggaaggaaaggaggaacaggtatgatagcaggaaagagttggatcagaaactggatcaatgagcatccagctgtctgggagtttattttatttaatgtattatccaatgtggcaactattgtgaattttatagcaatgtggatctgcaccggtttcctgtttgtatctttagaaaacatcccctttcagtttttcgttttccattatacccaggtagaaagtgatctgggactgggcggatttttaagcttccttgtggcaacagcagcagcccaggcagtgaatttctatgtgcagaaaaactttgtattccgctccaatgcggcgtttgcaagagccgtgccaagatatatctgccttgcagtagtcttagtcattgtatctgcagcacttcccgcttacagccaggcattttttaaaagccttggacttccacaggcgctgatccccacactggccaatggagtcaacattgtggtacaggtagtactcagctatccggcaatgaagttctggatcatgccgaaataactttttaacattgctgttgagtccataaccaatacagaatataattttattgaccctgggagaaaattccagggttatttttatattataagaaaccaaaagttatacaaatcataactttatagaccagaattaaaatatgccagatttcaggagatcaaaaagtgaatttttgacgaaaaaagcagaaataataacataatgttatgcaaatataataatatgaaatattttacttatgattatctttgtatataatagagtatataaaagttacgggcctgtaataaatagtagcaaatgaaaaagtgtggaggtagttttatgagcgtaacaacctatgcaatccttggttttgcaatgatgttgatcttaacggcggttctggtatctggtaagttcacgccttccattccaatgattgtaattcctattatttttgcagtaatcatgcatccgacatttgcagatttatccgactgggtaacatccggattaaaaggacaggtcagtaatgcagccatgttcacgtttgcaattattttctttggcgttatgatggatgcaggtgtttttgataagatcgtaggcaagatgatgctaggagccaaaacagtaacagctgtatgtgttctgactgttttagcaacgatcgttggacattctgacggatctggcgctaccacattcctgatcgtaatccctccgttcctgatgatctataaaaggctgaaaatgagaccgatcgtgctgatgtgcctggtttctattacagcaggtgttatgaactgcctgccatggggcggaccttgcggacgtctggctgctggttttaatatttctgcaactgatattctggttgctgaacttcctggtctggtgatcggactgatctgctgttttgccattgcattatattatgcaaggcaggagaagaagagaggcgccggccttgaggcaggagctgacactgcagatttatttagtgaagcagataaaaccgaagaagaaaaagcattattaagaccacagctgttctggtttaacgtagcattgatcgtaatcgttattattgcaatgtttgcatcaggacttccaacattcctctgcttcatggtagcagcagcaattgccctgatcgtaaattatcctggcacaaaaatccagaatgaacgtcttaaatcttatgcgccaacagtactgactatggtcagcgtattatttgcatccggtgtatttaccggtgtgttaaacaacagcccgatgaaagactccatggttgaagtagtatccggtattctggagggaagtgcaaccgcacatattaataccgttatgggcttcttatggggacctttaagtgccattggtttaaaccacgaagcatgtgcatataccattgtcccaatgcttcagtctatcgcagcagaccatattacacctgtacaggcagcagcaagctatctgatgaccttcgttccacaggtattcgtaaatccaggtactgcagcaatgtacatcggacttggacttgcaggtatcgatttcaaggatcactggaaatttacctttaaatgggtaatgctgatctgcacattgtgctttgcaggctccattctggttggtacaattccattttaaaaatgctttttatttgcagccgtttcttctataataattttataatcaataaaaaggttacatataaggaggaaatggctgcaaatgtccgaattaaaagaacagagatatatcatcgagattgcgaaagtacagggagttgccaaggcagcggaaaatctgtttatttcccagccagccctcagtaaattccttacaagaacagaagaaatgtatggcgtacagctttttgaacgtataggaaagaaaatgatcccaacttatgcaggaaagcagtatttggaatacgcaaaacagatcgtaaaactggaccaggactttagaaaccagattgcagatatcaaaatgctgaaaaagggttctctgaatattggttcaacgccaggtcgtggaaaaagaatattaccggaaattcttccgatcttcagtaaagaatatccggaatatgatttgaatgtttaccaggaaacagcagtaaaactggaagaaatgcttcgcaacggagagatccaggtcgcattgatgacaggaacagaggaattagaaaaagacagtaattttcatgtagaggaaatctccacagaggagatctgtctgatcgctcctaaaagtaaacattttcatgggatcgccaagtatggtttcaggtatccatggatcgatatacggcagatggaaaatgaaaagtttattatgttaaataagggatccagactacgttatgtaacagacaaagtgttgaaaaaccattccatggatccaaaacagatagagttttcttccattgaaaccatctgggaacttgtttcaaaggattttggtgttgcattggcatctgattttcaatatccaaaaaatctggatgtagacgttttttctatttgttccaagccggttacctggaaatttgtaattgttaccagagtaggtggatacatttctgttcctgttcagcgtattatcgaaatcgcaaaaaatatttatcgagattaaacaatgaagaaggcagtggacaaaatgaaagaaaagatcagcttattaaaacgggtatccatcgttgatgatgcccgttctattttaagggatatggtgatcccgccggaactgttaaaagagaagacaaatggtggaaggataaccagcgtatgtgaaaagtcaaaagagggtggaactgcatatttggaagttatgggggtgatcgaaccactggatcctttggctccctgtatcgaatggaagatcctgcttcccacccagtggaatttaagaagtgttcagatcggcggcggagccaataacggaatgattccttctttagaaggtgctatgctgatgtctgattattgtcccatcgaacatggatatgtcgtatttggagatgattccggccatcagtctgctgatcctatgtctgctgattttgcagcaaatgaggaggctcttcagaattatatccggcatcatctgattaaaatgaacggcattatgcatgtggttgtaaaagcagcttatgggatcgacgcggagaaagtttattttgccggtggatctgcaggtggaagagaagctttggagtgtgcctgctcctatggaaaagattacgatgggatattctgcgcagatcctgtatccaattttgtccttctgcgtatgtggggcgctttgctttccaaggcagtatatgatagttacgatgaacacacacacccgttttcagatggctttatagatgaaaagacagtagaagcaatccgtaatgatgctattgagatgtatgatgaactggatggtgtaaaagatgggatcgtgtccaatatatatgcagcacgtatgaaccgggacgtatttctcaggaaaatccaggagaaatatcatctgacagacgcccagatccagacgatccaggtgtatgaggacggttttaaactggattattctatgccaaacggtgagaaaaggtatcatggatactgtgctttagagggcggcatcatggatcttggtcctgatcctgttccaagagaacccttagacaccaggtataacgtacaccatggagaccgttcagatggcgtattcaaatattttataacgaaagataaaaactggaaattgatcgatcacgattattataagccggatgaaaagctttatcatatgctgatggaagcctccagccagtatgatgtaagtatggattttgatgaatttgtatcacatggtggaaagctgatcctgtttaccagctggaatgatatgtctatcagcccctggcagatcatcaatcagtaccagaaactggtaaagaaatacggacaaaagaaggccgacagttttatgaaattttactgcatgccttctgccacccattgcagcggcatccgtatggattatctggaatggctggatacctggtgctcagaagaaaaatatccagaagaaactctctacggagtaatcgaaaagaccggcggtgaaatgcctatggcaacattcccgggatgggtgaaatataaagacggagatcctttaaagggaaccagctatgaggtttcttatgaaatcccagaagggtttttcgataattttgcataggaaggaaagtatatggtagatctgaaagaatttgaacagaaagcagcagacttaagggttcttggaatgaaaatttctattggacaggacacggtatatgaaaaatactgggacgaagactgccggagaaatatttattctgccagtaaaagttttacttcctgtgctgtgggatttgcagttcaggaaggtctgatcgacttagatgaacgtttgatggatgcttttaaggaggatattccaaacaacccggatgaaaatttaaagaaagccacagtgaaagaccttctgaccatgactttaggccaggaaaaaggctttcttatgggcaaacagcgtccaagaatggaagaacagaactgggtaaaagcatcccttgctattccctttgtgtatgagccgggaacccattttgtatacaataacgttggcccttatctggctgggatcctggttcagcgaagagcaggatgcgatcttttgtcatatctgactccacggcttttaaaacctttgggaatacgaaaaaccatatgggaggtagaccctgagggaaatacatttggtgcgggcggactgtttctgactgtttccgagcttcacaaactgggaatgttctacttgcagaatggctgttggaatggaaaaaagctgctttctaaggaatggatccatgagagtaccagaaaacaggtggaaaataataaaaactcttatggttatggatacttattctggggcggccgttataacagttttctggccaatggaaaatatggtcaatacaccatgatctttcgggataaaaatacagtgatcagtttaatggcagaaagcagggatacagatcatttagaagaaatcattgcaaatgaagtatatacaaaattataaagaacttagataattttgggcggagaggatgcaatatcttctccgcctgttattttacagaatatcaatatttttaacgctttttctccggttctcctcaatggctgcatagaattttcttgtaatattaacatcgttatgtcctaaaatatcagcaaccagataaatatcattggtttttgcataaagtgcagatccataactgcttcttaacttgtggggtgtgattttctttttaggtgttgcaatagcggcgtatttttttacaagatattcaacactgcgtacagcaatgcgctgttttctcagagacagaaaaagggcaggttcctgttggagatccaaatcttgtgcagttcgctcctcaaagtagcgttttaaatattgcgccacctcgtcactgaagtaaacggttgactcttttccgccttttctgtggatatggatcccattttcttccagatccagatcgtccagatttaacccgacacattctgatacacggatccctgtaccaagcataagggcgagaatagcacaatcccgtactttggttttttcatgaaactgcttctgcttttgagaaagcccagaaccgctttctgcctcttttaaaagtgtctttatctcatcctgatttaagcggatgatctccttttcccggatcttcggaacctgcatagaaagggtaggattggttttaatctgtccggttcgataaaaatagccgaaaaagctcttcaaagaaaaaaacttccgtttgatcccctgttctttgtttacattcttatgttcaggatcatcaggacggtattttaaatattcaagataacgctcaagatcctggatcgtaactgcgcaaagctgttccagggaaatattttctacagacaatttttcaagttccggctttaattttcttaaaaaatcaaaaaatgtgctgatgtcgtaggcgtaggagagtcttgtcatggaagatgtggcaggttcaattcctcgaaagaagtcggcgcaaaatggtgggagagcagcaagcagttcctgcagtttctttttatttttcagatcacgctgttcatggtattgtaattcttccatatccgatcaccccttgtttatttctttttcatttcctgttctaaagcagcctttgtctgttctaattccgtgcgcaatttgacattttcacggtccattttccgaagttcgtcctgtaattcccgttcttttgcaatgaccgcccgttcctgttccaaatccgcctgcattttggcctgttttaaccgattttctatatcactgtctttatctgcaagctgtcgttgtaagtcagaaatctggatcctgcattcaatctgttggctttctaactcccggatccgcccagatgcctgtttagaagtattttccagatctgttcgcagagcagtttcgtgggaaagtatttgttccaattcccggatccgcagctgaagttttgtattttcttctttatttgcatcatcggattttttaagagagtcatacctggaggccttctcctgaagctgctgattttgttcctgaaggatacgattgatctcttcctgatccgcagtagctttttttgcagactctaactggcttatggcatgctgagcctgttctttggtccggacctgttcctcttttaaggcagtgagagcagcatcctggttatttttttctccggctattgtctcgattttttctctcaactcatcaatggttttatctttacgttttaagtccgactgaaaacgctccaacacccgtgcctctgcattgctgcttaattcaatactgccaatataagccgacaggatctcctttaacagccgctcaaaattttcaatctccacagcacgccccggtgttgccgccttggcattatttaattccaaaacctgtataagatggtcaaatccctgggcctgattcatcccatgggtggtacaaaacaagcgaaatgcttccgctgagtctggatcgatccggaaattgacctgtttgctttcttttccgcttttttcgtctctcatattttaaaatcctcctgaaaaatagtatatcacaggagaagtgatttcgtcaaattgatagtataacattgttatacaatgatatgttatacatatctttgtataacgtgatataatagataaaaacaggggattatagcgtaattatcacaggataaatgtcagataattaggtgta

SEQ ID NO: 3608 - DNA, 513 bp, Unknown
  gut microbiota DNA sequence
ggggttgagccccgggctttcacttcagacttgcagtgccgtctgcgctccctttacacccagtaaatccggataacgcttgccccctacgtattaccgcggctgctggcacgtagttagccggggcttcttagtcaggtaccgtcattttcttccctgctgatagagctttacataccgagatacttcttcactcacgcggcgttgctgcatcaggctttcgcccattgtgcaatattccccactgctgcctcccgtaggagtttgggccgtgtctcagtcccaatgtggccggtcaccctctcaggtcggctactgatcgtcggcttggtgggccgttacctcaccaactacctaatcagacgcggatccatctcacaccaccggagtttttcacactataccatgcggtactgtgcgcttatgcggtattagcagtcatttctaactgttatccccctgtgtgaggcaggttatccacgcgttactcacccgtccgccgctcagtcaatc

SEQ ID NO: 3609 - DNA, 44242 bp, Unknown
  gut microbiota DNA sequence
gttgatcgaagttcggattacttagcttggctaattatcctaaaccttcattacttggtttttgttctgaattttctcaaaaatccaaaggtctaaaccagaccttttattttagaattttcagggttttacatactgtttaatcttcaattattaaggttcgttgttgttaacttcttcagcagcaactctgatatattatcataagtatttgcttttgtcaacaacttttttatttatttttctttttgtttttctgtcttgcgacagcgaaatatatattatcagatccacagcagaatgtcaacaactttttaattatttttcaaaaaaattttgccgcacattttcgcactataaaagggtgcctccaagcacccctttatactatatttatcagatgctgcaatccagtgtaaaccagaattccacaccatcttttacattctgtacgccacaggccttattgtgggaatccatgatcgccttcacaatggaaaggccaatgccacttccgccgtaagctctggtgcgtgccttatctactttatagaatttagtccagagttttccaagatcttcctccggtatattctgccctgtgttaaataccgttacttttacctctttatcatttttctcaatgcggatctcaatgcgtttttccccgtccaaatggttcatggcattattcagatagttggtcactacttcttctatcttaaactcatccgcccataccatgaccggttcgcttgcatcaaatataacctgagcctctttttgctgaagaaggatctttgcagatgaaagaacaccgcttattaatgtaaccagatcaaactgttccataactggtttgtcattgccaaattcaagggctgtaagggtaagaagctgttttaccattttattcatttttccggcttcatcctgaatgacctcacagtaatagtccctgctttccgggtcctctgccattccttctgtaagtccctctgcatatccctggatcagggcaataggtgttttcagttcatgagatacattggcgataaattcctttcgggcttcatcaatgcgtatcttctcttcaatgtccttttgcagttcattattggctgttttcagttctcctatggtttccttcagcttttccgaaagagtattcatactatttcccagtacaccgatttcatcctcggagtctcctgtataacgggcgtcaaaatccagctctgacatccgctccgacaaagctgcaagagagagaataggagaagtgatctttttccctgcaaaatacatgataatgcttcctgctgccaaggcaataagaccgatatataccatgaaacggttagacagatctacgctttcatgtatacttgcaataggcatggacatgataaagatagtcttattatcttcaaagaagccccagttctgcagatagaagcttttggcatgtttgtcaaaacttttttcaatggtgtagttttcttcatgcaccagtgtttctgtctttggtccacgctttccaaggatatactgctgcacacggtctgctaaaagtcttccatcccagaaagaaggatacgtttcatcattggtactgtctacgatcactaccgtaatattgtatttttcatttacattgcggatcagcctggtgatctcattttgttctccgtctttagaataaagactttgcaggtcatccatgatgtcttccccggctgccgctttttccattgcatatgcattgatctgggtataggtatcctgaaggatctttactttatcattcagataataattttccaaaaagaagctgttcatagcccatacggctaacaggaccattgccagcaggccgataaacagtcctataaatgtagttcggatggagcgtttcattcttcactcacctcaaatttatagcccattccccagatggtcttaatataatcacctttttcccccattttgctgcgcagtttttttacatgggtgtcaatggttctggcatctccaaaataatcgtaattccatacattatttaaaatcttctctctggaaagggcaattccctgattttctgcaaaataggtgagaagttcaaattccttgaaacttaattcgatctcttttccgtcgatggtcactctgtgggctgccttatcaatacagatgccaccgatattcattacatccgcagatactgcattggtcctgcgaagaagggcctctactcttgcaaccaggatctttggactgaatggtttggaaatgtattcatccactcctaaagaaaatccctgaagttcgtcccgttcctcacttctggctgtcagcatgatcaccggcactttagagtatttccggatggtcttaaggacttcccagccgtccattttcggcatcattacatccaataagatcagcgcaatgtctttctgggcaaaaaagatctccagagcctcttctccgtcacctgcttctactacagaaaatcccttattggtaaggaaatcctttaccagtttccgcattctctcttcatcatctaccattaatattttcaaagcatccatttcctgctcctcctgcttattttatgtacttataaaaaacttacttcgcccttattataacaaaaaaatccgggttttctacgctttcacacaagtttcacaactaggctgtttaagtgcaaaaaaccgggacatgcacatttacatatcccggctttctttccgctttataatgctttataatgccctacaagcattcagatacatgatctaatagaattagtcgtctaaatcttcttcgcttaccagctcatcgtattcctggtcatctaacatttcgtcaaatgcgtcagcaacgatctcgtactcatcatcatccatgatgttatccagaacaggagttccgtcttctgtctcgctgtaacggtacagataaacttctccttcttcggactctgctccttccataggaagaagggcaatatattcacggtctcctgcagagaagatgttaaggaccacgcactcgatttcagaatcatcatctaatgtcagggtaacggtcatttcctcttcttcatttaaattcttctcgtctgccatattttattcctttcatatccaatccggttaaatgttacagcttttcgctgttcatttacactttatcagactgcctgtaaaattgcaagctaatattcaattccttttctggcgggtattcccctggtataagggtgggcacgcatgaccatttccgtgacataatctgcagctgcaagcagttctttagaaggatttctgcctgtcaggatcacttctaatttttctggcttacaaccaatcagttccagcaggcgttcttcctttataaagccaaggctgcaggcgcctaccgcctcatctaagatcagcatatctgcatcctgaccccatgctgttttccaggctttttccagttcttccccgtaatattcctttgcctcttctttctcctgggaactcattttccaggaaaatccaaactgcctggtacatggcaggactgttatccccgggatctgttttaaaacttccacttccccggaatgatcatttttcaggaaacgttttatcaccactttttttccgcttcctgctgcccggacggctgcacctacagaagcagtggtctttccttttccatccccacagtagatatggaccaggccatctgttcttttaccagattccctctccttattttcttccctgttttccatttttttctaaatccccttttttaccaagaagtcctgtctccactacaaaccgggatacggtctgccgcttgtgataccgctcttttacataaaaaatatgcagccggtcctttgctctggtcattgccacatagaacatgcgccgttcttcttccagatccggctctaaaaccgccttatgatgaggtgttatgccttcatttgtatccaggatatatactactttaaattccagacctttacagctgtgcatggtcatcagactgacaccttctttttctgcctctcttaaggcagactgctcctttagctgctctttgtactcatccatatggttgaaccatgcctcataggtcttaaagggcacagcactctcctgaagggcatctaagacctcaaacaggtcctccggctttagtcttcgctcattggcatactctcttaagtaatcgtcatatccaatagctttccggatatagtttactgcacctgccggagccatttcccgcagcatttccaggtcgtataccagctggtcaatacggtccagcatccagtttttatcctgatagaaagatctcagctgttcccatcggatcaccttggtatctaaggcatcccggctgatataccttgcaggccggttgatgatctggagtatattggaacggctcagatcccctaaggccgcgtaaatgtagcagaacacatttctggagatccagtgttcataaagatttggcactgtatcccgcatatgaaaggggatattgtattccatcatccgctcgatcagaagtcttggtccctgattggtgcggtataaaaccgccatatcttcgtaagcgatccccatctggtggtaatcccgcagttcttctgtaatagcctttgtctctgctaaagggtccggccactcttttacaaatacaggacagccttttcccctgtttccatggatctctttctggaaacgtgttttattattagcgatcagttttcctgcgctctcgatcaccggatccacgcagcggtaatttacatccagcaggattctctctgcatctggataatctttttcaaatccaagcattagctccggccttgcgccccggaaacggtaaatggactgatcatcatctcctacgatgaacagattgttctccggcagagccagcatttttacgatctcatactggatctggttgatatcctgaaattcatcgataagtatgtacttatattttctctgccatgcctgtaaaatatccttacgttctttaaaaagctcatagcacatggcaagcatgtcatcaaaatccagaagtccctgtttgcgaagacgatgctcatagccatcatacagttctttaaagacggtctgggagcagctttttgcataatagttatctaaggacattaattcccctttaataaggctgatctctgacaatacagaagaaataaactctccttcgtcctcgatctccagatctgtctggtctaactgctccctgataaactggatgcgctgctcttcttttacgatattggaggcctgataccggtatgccagttttaatatcataaaaaagacagaatggaaggtcccaaaagagactctgctgcatcctgtcccggttatccgttcatatcgttctttcatttcacgggccgccgccctggtaaaggtgatcaccaggatatttccaggctccacgcccactttttccgttaaataacggacccggttggtaatgaccgtagtcttacctgagccgggtcctgcaagtacaagggcaggtccgtctgtgtgacggatcgcccttttctgtgcttcattaaaagccatgtattaagcctccagcatttcaatgcctttgcggatacgttttaatgattcttcttttccaagaacttccatgatctcagttgcgcctgcaggagtcatctgcttgccggaaacagcggtacgtacaggccacataacaaagcctgtctttacgccagtttcacttacataagcggaaagtgctgcaaacagagcgtcattgctgaaatcttcctgtgcttccagaataggaagtacatcttttaataccttaagggaagtctctgcgtttgtcttcatcttcttgtgagtatacatagcaatgtcatactcagaaagttcctcaaagaaatcaatgtgatccctgatctccgggaatacttcaattctggtctttaccatatttgcaatcttcttaagatctaagtctttcttgatcacttcttttaagtatggctcagccagcttatagaaacgatcaaagtccattgccttgatatactcgccgttcatccagcgaagcttggtcatatcaaaaacagacggagacttattcatacggtggtaatcaaattcctttaccatctcttccagagagaagatctcgttattgccttctggagaccagccaagaagtgccacatagtttacgattgcttccggaacaaagccctgttctaccaggtcctcaaaagaggaatgtccgcagcgcttgcttaacttgtgatggctttcatctgtgatcagcgggcagtgtacataaaccggcacttcccagccgaaagcgtcatacagacggttgtactttggtgaagaagaaagatactcatttcctcttactacatgggtaatgcccataagatgatcgtctactacgtttgcaaagttgtaggtaggataaccatcagatttgatcagtaccatatcatccagttcagagttatctacagtgatatctccgtagatctcgtcatggaaggtggtagttccctcagtcgggttattctgacggataacaaatggctttccagcagccaaatttgcctcgatttcctctttggaaaggtgcagacagtgcttatcataggtcatgatctcctcaccgtttacagtctttcttaaggactccagacgctctggtgtacagaagcagtaatatgcttctcctttttctaccagctgctttgcatactccatataaattccggaagcctggcgctcactctgaacataaggaccgcagccgccatccttgtctggtccctcatcgtggaccagaccggtttcttccagggttctgtaaatgatatctacagcgccttctacataacgttcctggtctgtatcttcaattcttaaaaggaagtcgcctccctcatgttttgcgatcaggtacgcatacagagctgttctcaaatttccaacatgcattcttcctgtagggcttggtgcatatcttgttcttactttcattttctcaccctctgattttagttttcttctttttcttccttcttctctgccaggtcacttggtctcatggtcaggttaattcttcccatcttgtcaacttctgcaaccttaacagttacttcgtcgccgatgtttacaacatcttctacctttgcaacacgcttatcagacagcttggagatgtgtaccataccgtctttgtttggtgccagctgtacaaatgcgccgaagttcatgatacgtactaccttgccggtaaataccattccagcttcgatatcagtaacaattcctgtaataatagcgatagcgcggtcgatcatagcctcgtcagtaccgcaaacatttacaataccatcatcgctgatgtcgatcttaacgccggtctcttcgatgatcttgttgatcaccttgccctgcttaccaactacatcgccgatcttctgaggatcaatggtgatctgcttgatctttggagcatactggcttaagtgctttctaggctcggagataactggcttcataacattgtctaagatgtacattcttgcttcacgggttcttgcaattgcctcttcaatgatcggacgggtcagaccatggatcttaatatccatctggatagcagtgatacccttttcagtaccgcctaccttaaagtccatatcgccgaagaagtcttccagaccctggatatcggtcagaacgatgtaatcgtcatcagtctcacctgttaccagaccacaggagataccagctaccatacgcttgatcggtacacctgctgccattaaggacagagtggatgcacagatacttgcctgggaagtagaaccattagactccatagtctcagatacagtacggatcgcatatgggaactcttcttcacttggaagtacaggaactaatgcacgctcagccagtgcgccatgtccgatctcacgacggcccggtcctctgcttggctttgtctcgcctacggagaaggacgggaagttgtaatgatgcatgtaacgcttggttgtctcatttgcatctaagccatcgatcttctgagcctcagataatggtgccagtgtgcaggcatttaagatctgggtctgtccacgggtgaacatacctgaaccatgtactcttggaaggatgtcgatctcagctgctaaaggacggatctgtgtaatcgcacggccgtctggacgcttgtggtcttttaagatcatcttgcggacagtcttcttctcatactgataaatagcatcgcctaataatggcagccactcttcgttctcagcaaatgcctcttccagacgctcagtaatagctgcaatatttgcctctcgggtctgcttgtcatcggtaaatacagctgtttccatctcttcagaaggaacgatctccttgatcgctgcaaataattcttccggaactgcgcagctttcgtaggtgtgcttttcttttccgcactcagctacgatggtatcgataaagcggatgatctcctggtttacttcgtgagctttgaaaatagcctcgatcatcttctgctcaggaacttccttggcaccagcttcgatcatgataactttctctctggtagaagctacagtcagagccatctcagatacctgtctctgagcggaagttgggttgataacaaattcaccatcaataagaccaacctgggtagtagcgcaaggtccgtcaaatgggatatcagaaatgctggtagcgatagcagaaccaagcatagcagtcagctctgggctgcagtctggatctacagacataactacgttgtctaaggttacgtcattgcggtaatcctttgggaataaaggacgcatagggcggtcgataacacgggaggtaaggatggcattttcagatgcttttccttctctcttattgaagccgcctgggatctttcctacagagtagaacttctcctcatattctacacttaaagggaagaaatcaatgccttctcttggctttgcagatgcggttgctgtagaaagtactacagtatcgccgtaatgcataaatgctgcaccgtttgcctgagctgctacgcggccaacttctacagtcagcttacggccagccaggtccatactgaaactcttaaacatggggtgtctccttttctcttttaatgtaacgttctgtaaatatacaagttttttacagggcaaaagacgccgaaactactgatctatcccaaacgatctgtttgggacacatcagcggtcccggagtgttccttttgcacctgtcttcatgcaaatatagggtggagtaaactccaccctaacatgaatgaaagcccgctgccaaatgtctatgcggccttgcgtacaagcacgcaatccacatagccgcccggcaacactttcatgataattactttctgattcccagcttttcgatcagagcacggtagccttccagatcggtcttcttcaggtaatcaagaagtcctcttctgtgtccaaccatcatcagaagtcctcttctggagtgatgatcctttggattctgctgaagatgagcggtcagttcagcaattctctctgtcagaatagcgatctgaacttctggtgaaccggtatctcctgccttacgtccgtactgtgcgataatctctgctttcttttccttagaaatcatggtaattcctcctaaaataatttaattttctcaccttaaaccaggctgccggctggagtcaccaggcaacggggcttcggcgttcttttatacttggttactgtatcatattttaaccgggttgtaaaggggattttccgcaaaatacttaagagcaaattctttgtctttttcgatccgttcttttaactcttctaaagaagcaaatttctgttctcccctgtcaaactccaaaagctggacctcgatcatttttccgtaaatgtctccgtcaaaatcaaagataaatgtctctacgcctaccggattatccccatggatcgtaggtttcctgccgatattagtaactcccttataatattttccctgtgcaaggactctggatacatagaccccgaatttgggcagacgtttgtttgccggcgggatgatattggctgttggaaagcccagtctcggtcctccgatatggttgccgtggactacaatgccgtggatggcatatggttctcctaacaattcatttgcttttgccacatttcccagggaaagttcttcccggatataggtgctgctgatgtctcttctgtgatctttttctttttggatcacataaagttcaaatcccagctctttgcttaaagatctgagaagttctacatttccggcgcctttgtagccaaaactgcagtccggccccactaccatggcttttgcccgcatccgttttaccaagatatcctttacaaatacagaagggtccattttacgcacatcatctgtaaaaggatactccaccaggtaatcgatccccattttttccatattatgacgtcgttcttcactggttgtgatcacagtggcagcttcacctgtaacaaggcttaatggggctgtgctgaaggtaaaaatagcagttgcatagcccagtgtttctttcagttcttccattgtatgcagaagcttctgatgtcctctgtgtcttccgtcaaattttccaagagttaccacagtgggctcttccagctgaaaatccactgtatctgctatatatttcatcagtttccttctccatccggcatgaacattttccatggtttccaccagtgtttttcttcctggtattcatatacacccataaagatcccctggctgttgtacatacggtatctgtctccgctttttctttcttctaaagatgtacttttttccaggtctaactgctgtttaaagcagggatttccatttttcaaagccttgtccccttctgctgttgtgtatacaggcagataaccttctaaggcttcttccagagaacagatatattctcctacttttccttcatctcttaaaacttcgatctcatccagtttcaaactgtcttttacctgaaaacggtctacacgggtacgcaggagagactccatgcagcccccgactcctaatttagctccaatatcttcacagagagttcttatgtaggttcctttggaacagctgactgtcatccagactcttggcagttctattttttcaacagaaatatctaagatctgtactcttcttgccttgcgctctacttcttttcctgctcttgcaaggtcgcaaagcttctttccatctacttttaaagcagagtacataggagggatctggtcataatctcccttaaaatccaggatcacctggcgcacctgttcttcatccagttctaacgccttttcatgatcttccgtaagcaccgttcctgtggtatcctgggtgtccgtagtctgtcctaaaagaagcactgcctcataggttttggaccggtctgtaagcatgtcacaaagccttgtcccatttcccagacacaccggaaggacgcccttggccgccggatcaagggttcccgtatggccgatctttttctgtcttaaaatccctcgaagccgggctacaacatcatgggatgtatagcccggctctttatacacattaatgattccgtgatacatttaaacctccccggctgccgcagcatctaactgcttggcaatgtgaagggacagattattgatcacatcatgaatacttccggacatggtacagcctgctgcacgcacatgaccgccgccgccaaaatagaacgctacctggcttacatctacgattttctgggaacgcagacttaccttatactgctgaggtcctgtctcatacaggaaaatagcaacctccactccctctgtaagacgcagctggtcgatgataccgtcaaggtcttttccggtcacaccgtaaaagtccagatcagactggcgcagggcactgaaaatggcctttccatcaaggaaggtaatgctttcaagaagcgctcttcccatgatctggttctgcacataagtctttttgtagaagctgttgtcaatgatgcttccaaagtcaacgccttttcccatcaggaaaccggcaatctccatcgtctttgcagaagtgcaggaatacttgaacacaccggtatcatgtacgatccctgtatacaggcattctgccacatttttatccacgttatccggatttaactgttcaaaaaggacttcgctggcagaacttgcatcagctgccactaaattgacctggcagtaacgggtgttggttacgtgatgatcgatgcaaaggctttttttcgcccgcttcagatacacgttaaaatcccccagacgttcttcatcactgctgtcaaggcagatgcaaagctcatattctttgtcatctgtttcatggtggatctcatcatagccctttaaataggcaaattttgaggaagcttcctccagatatacagctgcctgtatatccggataggaagcaagaagataattatacagacccagagtagagccgaggcaatcgccatccggtcttacatggcccaaaatcgctacagactttgttccttctaacgcctgttcaagaaccgtcattccagtccctcctcctcatcatcatgaagatcttttgtcacttcatcgatcagttttgacatgtttacgccatattcaatagactgatccagtataaatttaatttcaggagtgttacgtaaattgactctgtgagccagttcccggcgcacgaaggaagctgcgctgcgcagtccttcgatggttgccttgccggcttcttcatcacctaacacactgatatatgccttgcagtattttaagtccggagttacctctacggctacaacactggtcagcggatggatcctcgggtctttgatctcagaacggatgatctgacttaattccctctggacctccatattgatccttgtatttttaatgctgtttttacgcattatgatccctttctttcaaaaacgaaactatattctatacagcagactatctaggaacctctaccatcatataagcttcgatctggtcatcttcctgaagatcattgaacttctcgaatacaagaccacactcatatcctgcagcaacttcctttacatcgtccttgaaacgctttaaggaagctaaaggtccatcgtagatctgctcgccttctcttgtaatacggcagctgcagcctctctggaacttgccatccagtacataggaacccgcgatggtgccaacaccggaagccttgaacagctgacggatcactgcatgaccgatcaccttctcctcgaatacaggatccagcatacccttcatagcagcttctacatcttcgatggcctggtagatgaccttgtacagacgtacatctactttctcacgctctgcaatggattttgcagttgcatcaggacgtacattgaaaccaatgatgatggcattggaagcagaagccagggaaacgtcagactcattgatagcaccaacgccgccgtggattacctttactactacctcttcattagacagcttggtcaggctctgctttactgcttctacagaaccctgaacgtctgccttgatgatcagaggaagttcctttacatttcctgccttgatctggctgaacagatcatccagagacagttttgccttagtatcttccagaagcttgttcttgctctcagaaatgaaggtttctgcaaagcttcttgcttctttctcgttctcagttgctacgaatacctcaccagcctgtggaacatcatttaaacctaagatctctacaggagtggatggaccagcctcttttactctgcggcccttatcatccatcatagcacggatcttaccatagcatgcacctgcagcaatggtgtcacctactcttaaggtacctttctgtaccagtacagttgcaacaggtcctttgcccttatccagctcagcctcgatcacaagtccacggcccttacggtttggatttgcctttaattcaagaacatctgctgttaaaagtaccatttccagaaggtctgtgataccctcttttgtatgtgcggatacaggaacgaaaatagtgctgccgccccagtcttccgggatcagctcatattcagccaattcctgttttactttgtcaatgtttgcacttggcttatcgatcttgttgatagcaacgatgatctctacgccagctgcctttgcatggttgatcgcctcaacagtctgtggcataacgccgtcgtctgctgctactaccaggatagcgatatcagtagactgggcacctctcatacgcatagctgtaaatgcctcatgtccaggtgtatcaaggaaagtgatctttctgccgttaatctcaataacagaagcaccgatgtgctgggtgataccgcctgcctctcttgcagttacgttagtctgacggatggcatccagaagggatgttttaccatggtcaacgtgacccattacgcagactacaggaggtctggaaaccatatctgcctcgttttcgtcctcttctttcagaagttcagcaattacgtctaccttttcttcctgctcgcagagaacgtcaaattccattgcgatctcttctgcctgatcgtagtcgatctcctggtttaaggtaaccatctgtccctttaagaacagcttcttaacgataacggatggctgcagcttcatcttatcagccagttccttaatagttaagcgctctggaagggtaatggtcttaacatcctcaaccttagcctcttctttcttaggctgtggcatgatgaaagctccctttcctgtctttggtgctttcttctttccgtcttcttctctgtctctcttgtcaaaacggtcattcttatgagcgttcttgtttgcctgacgggtgctgcttggcttggtctggatcggggtatcaaaagcagatgaacggttgtctctgtttccagatgaacggcggttgtctctgctgccatttctgcttgtattgtccttatccttatcttctccgaaacgggagccaaagccgccctgatttctgtcacggttctggaaaccgccctgtggtctgccatcgcggttctgatagccgccctgtggtctgtctccacggttctgatagccaaccccctgtggtctgtccccacggttctggaagccaccctgtggtctgtctccacggttctgatagccgccgccctgtggtctgccgtcacggttctgataaccgccctgtggtctctcaccacggttatctcttccctgatagccgccgtttcttccatcacgattctggtagccgccctgtggtctgtctccacggttattatctcttccctggtagccgccgtttcttccatcacggttctgatagccgccctgtggtctctcaccacggttattgtctcttccctggtagctgccgtttcttccatcacggttctgataaccgccctgtggtctctcaccgcggttatctcttccctggtagccgttctggcttctgccctggaaatctcctctttcagcctgtgcaggtctgctctctgctgccggagcagatgcttcctgtacctgtggctttacttctgccgcctgtaccggtttggtctcttctgccttagcaggtgcctgctgtggctttggctgctgctttggtaccggacgcttgatctgctgctgtgcgttctgcggacggaatacagctgtcagtttcttctttgcaggctctgtctttccctctttcttctggctaacagcatttcttaccatattttcctggtccttagatacgctggaagctgcaaaaagagctgcagagctgtctttctgtttaataatatctaatacttctttactggtcttacccagttcatttgccagttcacttactctcattcaaactacctccatttacattcatccgtgatgccagggtcttggcaaatcctgcgtcctctactgaaagggaagcacgaaattcctgtcccatagcatgcccaagttcctcttttgtgccgaacagatagatgggaactttatagtgagtacacatattggtaaacattttctttgtattatcagaagcttcttctgatacgatcaccatatgggaacgtccgcttttaacggatttctctgtagaaaattctccgctgaccacttttctcgctctggtcgccagtccgatcatactaaatactttattcttgtctgtcaatttcttccatctccttttccagagtctcataaacttctctggggatcgccattttaaaggatcgttccaggcctctgcctttcacagccttcttaaagcactccatagacgggcacagataagcaccccggccgtttttacgtccggtagcatctaataagatctcaccttcggctgttttgatcactctaatcatttcttttttacttttcatctcaccgcagccaatgcactgcctcagcgggatcttctttacactcacctttgatcactcctcatcttccggaaaacctttttactgttcgttgttttcttcctggtagtcatcctgagctggctcttctgttgcttcctgctctgcatcttctgcattctcttcctcataagaaggagccggagcatcaccgtactgtaagcccatctgctcaaacaggcccatttcctttgcctgtgtctcgctcttgatatcgatcttaaatccagtcagtcttgctgcaagacgtgcattctgtccctctttaccgattgccagtgataactgataatcaggaacgatgacctgtgcttctcttgcttcttcgtctgcaacaacgcagataacctttgccgggcttaatgcgttttcgatcaggtatgcaggattttcatcccagttgatgatatcgatcttctcaccgcgcagttcgtttacgatggcatttactctggcaccgtttacgcctacacatgcgcctactggatctacacttggatcattggacttaactgcgatcttggttctggaacctgcttctcttgcgatggccttgatctctacagtaccatcatgtacttcagatacttcctcttcaaacagacgctttacaaggtctggatgggttctggatacggaaatacgaggtccctttgtagtatcctttacttctacgatgtaaactttgatacgctcatttggacggaaagtctcaccctttacctgctcactctcatttaagatcgcatctaacttgccaaggttaacactgatattttttccaaggtaacgctgtacaataccggtagcaacgtctttttccatggtgtagtaatcattgtataatgccttgcgctcttcttcgcggatcttctgaaggataacgttctttgcgttctgggtagcgatacggccgaatttcttggaatctaaaggaacctgtacggtatcaccaagctggtattttgcgctgatcattcttgcatctgccaggctgatctccataaccggatcttctacctcttctactacggtcttctctgcgtatacagcaaagtcaccggttgtacggttcataacaacttttacattgtcagccttgccgaaattgtttttacaggcagtgataagggaattttcaattgcctctatcatggtatccttagagatatttttctctttttccaatacctccattgcctctaacagttccttattcatgtttatcctcctatcatgttctctgtatgatacagttaaaaatcaagtgccagacggatcagtgcgatgtctgccttttcaaatacagcctcacttccatcttccatggtcagtgtcactgtcttatcatcatatgcgcttaatgtgcctgtaaattccttctgtctgtcgatcgccttgtacagtcttacttctacttcacggcccatgctgcgtacataatctttttctttctttaaaggacgtcccagtcccggtgaacttacttccaggatatagctgtcatcgataaagtcttctttatccaaccagtcgctgagcttgcggctgatcacttcacagtcatctacggcaattccgccttccttatcaatataagcccttaaataccaggtaccagcctcttttacgtactctacatctaccagttcaaagttgttttcttccataagtggaagaagataggcttctactctgctttcataactttccttttttgtcatgtctacaccacctttctttccctaacaatacgaaagagtggaccagcgcccactcttacattaagtaaaatccattagttatcgtatacactataccatcatgtgtgtggaattgcaagcacttttttccatgggctgcccaggctgtatttcgactgtgttccagctgtgtttggctgtaaatcagctgtggagcaatgctgctgcctgcgggaaaggtttcaggctgcgctctaaaacaccatggatataggcaatggtcattccataattggtaacaggaacattctggtcacaagcacatttaatgcggtacttcatctcttttgcatttaacatgcagccaccgcagtggatgatcagtttgtactgtgtcagatcatctggaaattccgttcctgaagtaaaggtaaattccggctctgcttttgtaaactgacggatccagtttggcagttttacagttccgatatcaccgcactgtctgtgatgggtgcagccttcgcagatcaggatcttatcgccggtccggatcttatttaaagctgccactcctgcgatcatggtctccagttcgcctttgtatctggcaaagagaatggagaaggaggtaagcagaatatcctccggtgtatcttttgaaacttttccaaatgcctggctgtctgtgatcaccagctttggcttttttccaatattttccagtgtgttttttaattcattatcttttactacaatagaaacagcgcctgcctccaaaatatcccggatagtctgctgctgtggaaggatcaggcggcctttaggggctgctttatcaataggaactaccaaaacaacaaaatctgaagggtctaacaggtcagataccagtggttttgaaactgcttctgtttttgcagcttttgcaatagtttcttttaattctgtgatacctgcctttgtgcgggcgctgactccgagaaccggaatatcttttatcttctccggacagactgcatttttctgatccatcttattaaataccaacacacaggggatctgcttttcctgcattctattaagaagtttctcctcctgttcgccaaaacctgcctggctgtccacaacgatcacagctacatctgttttatttaacacctgatagctttttcttacacgcaatgttcccagttcaccttcatcatcaattccaggagtgtcgatcacagttacaggtcctaacggaagtaattccatggatttatacaccggatctgtagtcgttccttttacatcggatacaactgccagttcctgtccgatcactgcatttaacacgctggattttccagcgtttcttctgccaaaaaagcctatatggacccgttctcctgtaggtgttttgttcattcccatatctgtacctgcctttcatgctctgcatagccgttttgtggttattatacttgtatgagaactgtttttcaaacagtttttaagccgtttttgtacgaaaaccaatatttgcttttcctatataaatagagtataatacatcggagaataacaactataaatacaccaggaggaacctgttatgacatttgtatatcccgctgtttttacccctcatgaaaaggacaatggttttcatgtagaattcccggatctggaatgttgtgaggcagacggaccggacttagaggatgctgttgaaaatgccagagacgcagccagaaactggatcactgcagaactggaagatacctgtgagatcccgccttctacccatgtagatgatattgagttaaaggaaggtatgtttattaagaatatcatggtcattatcaagctgctgcctgataacgactgatgtgttaaaaaatccctgaacacactataacatgtgctcagggatttttcattctaaaacagatctattctgcttaccgcaggcagcgggaacgtcattttttattctccgatcataatcttgatgatctcttcgtttgtttctttcattccttcttttccaagacggcctacattctgtaaggtctcttctacacccttggtaacgattccgtcaccgccgtagaactgctggcctctgatgtacatattgtatcctaagatacctgcttctactgcagatgcgatcttcgctgcacaggatgcctttgcaccgtcacagacaataccggatacgatagccagtgaatttactactgtatgtgcgatctctttgaaaccgccgccgcacagatatgcgatacctgcacctgcgcctgcacctgcactgactgcaccacagtatgcggaaagacggccgatcggtgttttctgatggatcgctgcaaggttggataatgcaagagcacgatacatcttctcttctcctacctttaattcttttgcatatacaataacaggtacagaagctgtaattccctggttaccgcttccggagttgataactaccggcagttcacatccgttcatacgggcgtcagaaccagctgctgccattgcttttgcacggacacgcacattgtttccttccatatctaacagaaccttaccaatgtttgctccgtagtttcctttaattccctcttctgcgatcgcccagttataatcgatctgacgttttaagatcggtttgatatcttctacatctactgtattaataaaatcgcagatatctttcatatttaaaaggcttctgtctgtcaggccttcttctgtttcaccagctacttctgtctgctctaaaatttcaccgttcttttcgatcaggacaatattggtgtgatagttggcaatacgtacctttgcgtattcatcccctttgtacagggttacgataatgtcaaaagttagtccgttatctacatgttctacagaaataggagtctttttcagaaattccttcatctcctctacctgctctttggttacacttgcgataacttccagttccttatcaggatcacctgcaatgatacctgcagttgcagctgccggaattccctttaagtgatcggtatttggtacgattactgactttacattcttgataatgcttccgcttgcgccgatgtctactctctcaggcagctgccccagtacttttcttgcaactgctgctgcataagccagagcgatcggctctgtacatcccatagcagggatcagttcctcttttaaaatttgaatatacgcattgtatttttcatttgtcttgtccattttcacagcctccagatttgcccttgatttattactgcacttactgtaccatagaactatcctaatgtaaaatttaacgttttaaacatattgtttaaaaacttttatagataagcgaggtcattctatggaatttcgtgaactgtcaacctttcttcaggtggcaaaactgcaaagtttttccaaagccgccaaagtccttggatattcccaggccgctgttaccatacagatcaaacagttagagcaggaactgggggctcatctctttgaccggatcggcaaacagaccaccctgacacaccagggcagtgttttttatgaatacgcagcctcgatcatacgggacatggcgcaggcaaaagatgctgtttcccatccccaaaaactgacgggccgcctgtgtatcgggaccattgagtctatctgcgcatctattttccccaacctcctgacggagtaccacaaacgtcacccggaagtgaacatcagcattcgcaccgactccccggaccagctgttagagcagatcaacagcaaccagttggatctggtttattttatggacaagcgggtctatgatgtgaaatgggaaaaagtattagaagaacctgaggatatcgtatttgcagctacaccggaccatcctttggcccagcgtgacgaaccactggaactggatgagatcctttcctatccttttgttcttactgaaaaagatgccagctaccgcctgctcttagagcagtatctggctgctatgggcaagcatctggatccttatctggagattggaaacactgactttatcctgcagtttttaagacagaatacaggtgttaccttccttccccattttacagtagaacgatccgtaaaagaaggttatctgcgcatccttccggtaaagcgttttgccatccgtacctggagacagctcctctatcacaaagataaatgggtaacacgggaaatggcggagtttatcaagctggcccaggaactttcttaatcccttattttctgttccataaactttagataagaaggtcctttattctgtactttacattttctatgatgtgctgatataataaaaatatatggtatgtatgaattaatgttatacatgtattttaaacatacttacagaattttggaggtcttcatggaacaaaatctttctcaatataaaatcttttatgaagtagcaaaagcaggcaacatttccaaagctgccaaagaactttatatcagccagcctgccatcagcaaggccatcagcaaattagaggacagtctggggctttctctgtttacccgcagctcccggggagttcagctgacttctgaaggggagattttgtttgaacatgcaaaagaggcttttgatactttaagcagaggtgaacaggagttaaaacggatccaggaatttgacatcggacatctgcgcattggtgtcagcaatactctctgtaaatatgtactgctcccttatcttaaaacctttattgaccagtatccccatatgaaagtgactatcgaaagccagtccacagcccagacgctttccaggctggaacagcagaaactggaccttggcttagtggcagagccatcccttcgcaaggatctggcgtttatcccggtcatggatatccaagatacctttgtcactacaccggcttatctgaacaatctgtatgtacgggaaggtaaagataccaatatttttgagacaggaaatatcatgcttttagatcagagcaatatgacccggcatcatgtagatgattacatgtctgaaaatcatattgtaccaagacaggtattggaagtaaccacaatggacctgctgattgaattcgtaaagatcggacttggggttgcctgtgttatcaaggaactggtacagaaagaactggataacggtacactggtagaattaccactggaaataccgatccacagacggaccattggttttgcctatcatcccgcaaatcaggcaatgtcactgaagacgtttttggaatttttatattaaaacagatttggacccgcgctgacgcgcgggtggtgagaggggctctcttgaaaaaatggttttacgccatgccgctatataaaaaaccgcaaaaaaactcccggaatttcaaaggtcacagccttctgaacttccgggagttttaatattttatacgcgcttcgctacgtttgggtagcgtgtacgggaaactcaaactccattacattacgtttgagtagcgcgcaatttcacaaaagtaaaattgtgcttaattgttgatcagcttatcagactcattattccagctgtacagcttacggatctcagcaccaaccttctctgatggatgctcggaagcaagctttctcatagcctggaagtgtacctgacggcctgctggggacatatcaagtaagaattccttagcgaaggtaccatcctggatatcggacaggatcttcttcatagccttcttagtctcagcggtaacgatcttaggtccggttacataatcaccatactcagcggtattggagatagagtaacgcattccagcgaaaccagactgatagatcaggtctacgatcagcttcatctcatggatacactcgaagtaagcgtttcttggatcatatccagcttctaccagagtctcgaaaccagcctgcattaaagcgcaaacaccgccgcaaagaacagcctgctcaccaaacaggtcagtttctgtctcagtacggaaggtggtctctaacagacctgctcttgcaccaccgattgcaaggccgtaagccagtgctttctccagtgcttttcctgtataatcctgctctacagctaccagacaaggagttcccttgccagcctggtactcactacgtacagtgtggcctggtgccttaggagcgatcatggtaacatctacattctttggtggcttgatgcatccgaagtggatattgaagccatgtgcgaacatcagcatatcgccatcctttaagtttggctcgatgtccttcttgtacatatctgcctgcagctcatcgttgatcaggatcatgatgatatctgctctctttgcagcctctgctgcagtatatacagtgaagccctgctcttctgctctcttccaggagcggcttccctcatacaaaccaatgataacattgcatccggattcctttaagtttaatgcatgtgcatgtccctggctgccgtaaccaataatagcgatggtctttccctctaacattgaaaggttacagtcttcctgataataaatctttgccatagcgttttttcctcctactatcgtataaaagtataaaacttatcaccagcaaattcactggcatatttatgttaagacagcaagtccgacgcctctctgttcgcctttggctgcccccttaagctcttttttcattttgccttatggcaaaatgcggatgtcttcgctgccacgctccagtccggtgagtccagtacgggccagttccaggatctcataatcttctagcagattaatgagcgcatccagttttgactggtctcctgtcagcataacagtcagggaatcttttcccacatccacaatggttgcacggaaaatacttgagatggcgctgaccgcctgacggtcatttgatccggctcttaccttgatcatcataagctccctgtatacagagcgatccggatgaagttccttgatatctcttacatcttccagtttatttaactggttcttgatctgctcaagaacattctggtctcccagtgacacaacggtcattctggaataccttgggtctgcagtaacacctactgtcaggctctcaatattatatccacggcggctgaacatgcccgctacacgggacagaacacctgccgtattatccactaacaatgataacacgattctgtcatccatcatatcatttgcctccatatcggtccgccgcagacaaatgtctttcagcgtcccacatattagtttttataataacaaccattacccactttgtcaattgcctaatagtaatgggtattatgctttctggttatgataagagcatttttctcaattcattaatactttcagctatataagcagcgtggcagtcttccatttccttcctgtcaccatagccaaacaggacgcctacgcactctaatccctgctttctggcccccaatacatcatgttctctgtcaccgatcatcaggatcttttcttttttgtcagaaaggccgcaggtatctaaaacatactggatcacatccccttttcctacacgggtctcctccaggtcagcgcctccaacaaactcaaaataagaagccagatcaaaatgttccaggatctgctttgcaaatacctccggtttggaggttgcaagatacagcttctttcccgctgcttttaattctcctaacatttccggaatgcctggaaatactttattctggctccagcctgtaacggaaaaatattcacggtacacctggatcgcttcctttgcctgctgttcagaaaaatcataatatttctggaagctgtcttttaatggcggaccgataaaaggacataaactgtccagatcatccacctggatcccatagtgttttaatgcatactgaactgcctttgtgatcccctcttttggatctgtcagcgttccgtccaggtcaaacagcagataatctttatttttcatgttgtaattaattcccttctaaataaatattcagctttcgtaccagtctgtgatcgcattaccttattttatatcaatttcggatcatccctggtcttcaaaaagagtcccgtatttaaacgccttcatcatctcatgtcccacgctgatataaggcgggtactctacgatctcatcccggctaaaccaaccagcctctgccagttcatcttcctctaaccggatggtatcatctccatccaggtctgcggtaaaaccgatcatcacagagtcagaaaaggaccatggctggctcttgtaatagcggatatttttcaccttcaggcctacttcttccattacttccctgcgtacacattcttcaaatgtctcgcccacttccacataacctgcgatcagtgcatacctgcggtaagtgcctcttgcataccgggacataagcagtttgtccccatttcggatagctacgatcacagccggacagatctttggatactctgtatgtccgcaatctgtacacaccatggaccgttctgtagtcccagctctcatctttgcgccacagcagccgcagaacctcctgctttctctccaacggtagatctggcttcctgtaatacctgcaaacgcctgataccccggttccagttccctgaagatctgcattccttccaggcggtagctgccaaattccggcactttcagatcatctaccagataatagcctctttcaccgatggaaaacagatagtacgccttttcccggcagtcttcttctgaaagaagatcctgaaaggtagggatcacataaccttctttttctttcaaaagcattactttattgtattcataatgcaaaagatagtctgtgagttccggctttttatctttgtatgccggatcatatttataaggtatctcctgtatcattttaacttacgactcctttaatagctcttttaataatcctttttctgaaaccactttcttccgtccacgcgccgcagactgctgaagaagaaataataaataacaaaggcaatggaagtaatggtccatgataaaggatagcagaacgcagctgccaggatggatctgtactgtggcaagaaaaagatgatccagatcacacgcagacagcaaacgccaatccccgtcatgatcaacggcatccaggcatctcctacaccgcgcagtgtaccggataatatctctatggtaatataggtgatcaatgtaggcaccaggaaatggatcagacttaaaccgatctcctgtacctgtgcatctgatgtaaacagatcaatcagcagatatccttttaagtataataaggtggatacgatcgctgtcataatcgttccaatgatcatacaggccccggcacccttatgcacacggtccatacggccggcaccataattttgtcctacaaaagtggtgacagaaattcccaaagcattgatcatcatccagtaaagtccgtccacttttccataagtagcccaggcagttacattatctgtccccagtgtatttacacctgactggataatgatattggaaatgttatacataaccgactgcataccagccggaataccgatgcgcacgatacgctggagcatccgcccgtcaatacgcaccttgctccacaccagtttatacatatcttctgtatgtgtcaacgcataaaccaccatgcaggcactgaaaaactgggaactgatggtggcgatggctgcaccggcaacacccagacgcagtcctgctaccaggatcaggtctaagaggatattgaccatacagcttccaataaggaaatataaggggcgcttggagtcccccactgcacgcaggataccggctcccatattatagatcaggtttggtatcatacccaggaaatagatacggatgtatacaaccgcatatgtaagtacatcttccggagtgtgcatggctgaaagagccatatgggcaaaaacaacaccgatgatcataaacagaacaccgcctataagcgaaaacgctaccgccgtatgcacggcccaatgcaccttatccggctttctggcaccataaaactgggaaataactacagtcgcaccactggaaaggccaacgaaaaagcccaccagaagattgatcagggtactggtagtaccgccaactgctgccagtgcctgtttgcctacaaaacggcctactaccactgcatctgctgtattgtaaagctgctgaaaaaatgtgccaaacaaaatcggaaaaaagaataataacagctgaccgaaaatgctgccttccgtaatcttattggtattgaccttattttttatctctttcatctttttctcccagatttttccaacaaatagagaaaaggatacccaccagttgaaaaattttcacttactgatgggcaccatgtttatttagtatcttcttttgcagcgatctcagaaatagattttacaagacctgctattccctggatatcagacgggatgatgatcttattggcttttccgtctgctgccgcctggaaggcttccagactcttaagctgcagtacagcctggtctgctccggcttcttttatataacggataccatcggcagttgctctctgtacagcgcggatcgcttctgcctggccttctgcctctttgatcttcttttccttttctgcttctgcacgaaggatggctgcctctttttctgcctctgcatttaagactgcagactctttgtttccttctgcaaccaggatcatggacttcttctcaccctctgcacgaaggatcgcttcacggcgctcacgctctgccttcatctgcttctccattgcttcctggatggctgcaggcggttcaatgttcttaagttctactctggtaaccttgatgccccatgggtcagtggcaatatcaagggactcctgcatctttgcattgatggtctctctggaagttaaggtctcatctaattccagctcaccaatgatatttctaagggtagttgccgtcagattttcaatggcaaggatcggacgctctacaccgtatgcataggatttcggatctgtaatgtagaaaaatacaactgtatcgatctgcatggtaacattatccttggtgataaccggctgtggcggaaaatcctctacctgctcctttaaatttactttctttgccactctgtcaataaatggcaccataaaatggatacctacaccatatgttcccagataaccgccaaggcgctctacgaccagtgcctgagcctgaggaacgatacggatacaggatgtaagaatgaaaataatgagtactaccagaataagaaacatcacggaacctccaatcagcatcatatttgacctcctgaaatttactgtgataccattctacggtaccatgtataatttgtatgaatatagtttaacatatttctgattttattcaatcaaggattgtaaaagtgatgaattcttaatataatcgtaagcgttaatacttttaatcataactcaacaaggagatactttgtatgaaaaaaatccttctgttaggaacaggcggtaccattgcctgcaagcgtacacccgacggtctgaaacccgtcattacttccgaagagatcttaacttatgtgccggacagccgccactactgcgagatcgacagtatacagatcttaaatatagacagtaccaatatccagccttcccactggctggcagtatcaaaagctattgaagaacattatgaggaatacgatggttttgtgatcacccatggaacagataccatggcatatacagctgctgctctttcctatctgatccagaattctccaaagccgatcgtcatcaccggggcccagaaacctattgatatggaaaatacagacgcccgtaccaatctggctgacagtcttcgctttgcttcccatgacaaggctcacgggataaatattgtatttgacggaaaagtcattgccggtaccagaggtaaaaaagagcggaccaagagttataatgctttttccagtattaattttccttatattgccattatccaggaagaccatatcctgttttatttagacgacaaggcgcaggtcacagagcctttgactttctatcaccagatggactccagtgtgggactgataaagctgatcccatctgcagacgcttcccttctggactatatggcagctcattatgatgcagtgatcattgagtcctttggcgttggcggacttccttcttatgatgacggaggcgactactaccgtgcagtggctcattggatcaaccttggaaaaactgtgatcatgacaacacaggttacaaatgaaggcagcaatatgtctgtttatgaggtcggaaaaaagatcaagcgtgaatttggtctgttggaagcttatgatatgaccctggaggcagctgttaccaagatcatgtggatccttacccagacaaaggaacctgcaaaagtaagagagctcttctaccagaccgtcaaccatgatattttgtggaagtcttcttaaaggccccaactttacttttttatatttcctgttataataaacaggcagtcttcttaattttcttaagtcagactgcctgttttatgtattttattgcgggggtttttacatgaacgagaaaatatcacaattcaaagccggattaaaagatggtattcccattggacttggttatctggcagtttcctttacctttggcattatggcaaaaggggccggacttaccactttggaagccgtagtcctctcttttaccaacctgaccagcgcaggtcagtttgcaggcctggggatcattactgccggttcttcccttgtggaaatggctatggcacagctgatcatcaacctgcgttactgcctgatgtcctgttctctttcccagaaactggacagtcatatgccattttttcaccgttttcttatgtcctacggtgtaacagatgagatcttcggtgtatctgtatgtaaaagcggggtcttaagcccttatttcagctacggcctgatggctatggctgttccaggctggaccatcggcaccctccttggtgctgtttccggcagtcttcttcctgcgaggctgttaagcgctttaaatgtagctctttatggtatgttcctggcagttgtcatccctccggcaagagaaaataaggttttgcgcatggttatccttgtttccatggcactcagcttccttttcacccagataccggtattaagggatatttcttccggatttaagatcattatccttacatttatcgtagccgggtctgctgcagttctgttccctgtaaaggaggaagaataaatgaaatatccagtttatctttacatagcggtaatggccattgtgacatatctgatccgtatgctgccattgacactgatcaagaaagagatcaaaaatccttttatccgctcttttttatattatgtgccttatgttaccctgtctgtaatgaccttcccggccattatctacgcaactgcttctcctgtttccggagctgccgctttggcagtggcactgtttttcgcttataaaggaaagagcctgttccaggtttccattgcagcctgtgccatcgtgtttatcctggagtttttcgtataatataattgcattgacctggaaaatctgtcactggcaggttttgacaagtgaataagatgaataaccaaaaaaggtcccggagcagagattttctctcacttcaggaccttttatattttacttatactcagattttctgcgctttttatcccagcaggaactcgcttaaaacaaaattgcttacatccatgccccattctgtaagggcaagattattttcttcttttttcagcagcccgttggcagtcagcctgcggatcacatcaccatagaccgtttccattttcacaccaaacagtcttacaaagtccacatcagacacgccttttaacatacgaagccctaaaaacataaactcttccattcgctgtgcctgggaaagttcttctatttgaccccataatttgcgaagggctgtctcccgcttttccggatcttcttcaccaaaatccagtgccagatacttatccaggtccttttcattggtaaaacgacagccttccatataggaggatgccccaagtcccagtcccagatatgccacctcagtccagtaaccgatattatggcggcattcttttcccggttttgcataatttgagatctcgtaccgctcaaagccctgctcctgcaggaactttctggtaaaacggtagatcttattttccgtatcctcgtctggaagcgcaggtcccgtataatcacaggcacaggcgccttccccgaaacggttccagaaaggcgttccttcttcaatgatcaggctgtaagcggaaatatgctccggttttaacatggtcacttttttcaatgtatttttccaggactccagggtctgtcccgggatcccgctcatcaggtcaatattaatgttggtaaagcccgccattcttgcgctctggaagctttttaaaaactcctcaaaagaatgaatccttcccagatttttaagttctgtattatccgcagactgtaagccaatgcttacgcggttgatcccgcactgtctgtaaacaggaagttttttccctaaaagcgttcccggatttgcctcaatggtgatctccgcctccggttctacctgaaaacagctgaatacagtttccatgatccggctgatacaggaaggttctaaaagggagggggttcctccgccgataaatacgcttactacctggcagtccgtacaataacagctctgggccctgatctcacggatcagctgctgtacataagcctcatggaccgaagacagggcacgaaatgaaaggaaatcgcagtaatcacattttttcacgcaaaagggaatatggatatacagttcaatgggcttttttttcatgtttgttatcatcattaatctttttcaagctggttcagccatgttctcttcttgtttccctattcacaaaaacaagaagcatcattggttctactcttcatccagcttcagcacgctcataaaggccttctgcgggatctccacattgccgatctgacgcatgcgcttctttccttccttctgcttctctaacagctttctcttacgtgaaatatcaccgccgtaacattttgcaagtacgtccttgcgcactgccttaaccgtctccctggcaatgatctttccgccgattgccgcctggatcggtacctcaaacaggtgtctcgggatctcatcctttaacttttcgcacattctcctgcccttttcataagcagagtctgcatgtacgataaaggaaagggcatccacttcttccctgtttacaaggatatccagttttaccagttcggaacgctcatagccctttaactcatagtcaaaagaagcatagcctctggaacgtgattttaaagcgtcaaagaaatcgtaaatgatttcatttaacggaagttcatattttaataaggctctggtagtctcaatgtattccattcccagatatacgccgcggcgctcctggcacagtgtcataatggcacctacatattcggtagttaccatgatctctgcgctgacgatcggctcttccatgtactcgatctcagtcggatccggaaggttagacgggttggtcagttcaatcatctctcctgtggtcttgtgtacacggtatacaacgcctggtgctgttgttacaaggtccaggttgtattcacgttccagacgttcctggatgatctctaaatgcagcagtcctaaaaatccgcagcggaaaccaaagcctaaagcaacagaggtctcaggctcgtagaacagggatgcgtcatttaactgcagcttttccaatgcatcacgcagatcattgtattttgcaccgtctgcaggatacagtccgcagtaaaccataggtgtaactttcttgtaacctggcagaggcgctgcacatggattgctgctgtctgttactgtatcacctacacgggtatcacggacatttttaatgctggctgtaatatagccaaccataccagctgccagctcgtcacatgggataaactgaccagctccgaaatagccaacttctacaacctcttcctctgctcctgttgccatcatacggatcggtgtgcccttctttaccgttccttccataacacggcagaagatgataacacccttgtaggagtcgtaaacagagtcaaagatcagtgcctgtaaaggcgcttttggatctccctttggcgccggaattttgtgaacgatcgcctctaatacctcttccacgttcagtccggtctttgcggagatcttcggggcatcatgtgcctccaggccgatcacatcttcgatctcagctgccacacggtccggatcagcacttggaaggtcaatcttgttgataaccgggaatacatccagatcatgatccaatgccagatatacattggccagagtctgggcctcaattccctgggaagcatctactaccagcacagcaccgtcacaggctgccaggcttcgtgacacctcataattaaaatccacatgtccaggtgtgtcgatcaggttaaaaatgtattcatttccatcttttgccctgtatacagtacgcacagcctgggatttaatggtaattccacgttcacgctccaggtccatattgtcaaggacctgttcctgcatctcacggctggtaagaagtcctgttttctcaatgatacggtctgccagtgtggatttaccgtgatctatatgagcaatgatacaaaaatttcgtattttactctggtcaattactgccattctttatcctctttctttcaatttagatgttggggtcaaaaggtattttgacccctctgataccgaattgctacgcgctttgcactctcgcaattctaaaaacattcgtaatccgctcatttttcttcaaaaaatggctccttactcatgttttggcgggtcccaagttcaaaaatcctcctgcaagcaagcttgcgtcggatttccgaccttttgcccctggtatctcaatctatagaatatcgtaactattttactatgttttcattttccttgcaacaccatatccaaaagttctgccaggggcatcatcgcattgcaggcctcctcaaaggtattggtctgggctcccacctccaccagtgctgatcttgcccgcaggtgctggttataacgcagtccttttaaatagatctttctggtaaaaccaggataatactcctctgcttttaactgcagtttcaggctaaatgccagattatcttcccgaaaaggatttgccagatatgaaatgggtccttccggcgtctggctcagaccattaaaaaacatgatcctggcacttggctgaccgcctatctctgttttcaggtatacatcctcccctacaccgtcccgatggatatcaagcactacctggatcgatgggtaccgggccaggatctcattaattccttccagtgcataagtgtacgcacggctgcggtccagcttgcccactgccagatcatataccgttgtgtcatggtaaacattccagcctttttctgtaagaagatccgtcagtttctgtcccactgcaaccacattttcatcttttttactgtttttgtaactttcctgggaatgggtgtgatagatcaggatctgaggcgcatcttccttttccagggtaagatcctttgacaacaggttcttagcattcatcagttctctgtctgctgtagtagaagtatgtacattatagaagtgtttcattaaaaaatcataatccatcaactgctgcatgggatagatcatgggctgatccgaaattttagcagaagcgctgtccgtgtttgcaggcgaattggcattttcagactgatccaatgcttcttcgctggctgaccggattgtttcctcatctgactcatcttccccgatccaggccagatattcatgggtgcggtaaaattcccttgctttttcatactggtcataggccggatccatggtgtttatggatgaccattttttctgtgtctgtaatgtctgatttgaatgttttcctgtaagatccatgcttaagggaaatatctgctgccagacccattcacagcctgactcccagacttcatttgaaaggttgttttttaataactgtatgtggttttctgctgcatacaaaatacaggctcctgcaatcatacataggatcaccaggatgcctgttatcttcagaaataatatccatttttttacatttctgctccatgatttcatggtgtccttccagttaaaaagaaaatattggcaccggggaaacaaatgccgccttcggcaccccttgtttttccctttatgtcatatatatgcagatcatcctgccggaagttcatcacatttcttattttttaggagaaaatggccactcggagatcagaaggcctacaagggtcaggaccgttcctgccattgcctgaaaggtgatcacttcatggagaagagggatcgacattaaaatcgttacaaccgggatcccgtaaatatatacgctggctctggtagcacctaaggactttactgcataattccaggtgacaaagcagattgcagaggcgcctacccccagataaatgatatttcccagatttaccggctttaataatgcggaaagggaaagatggaaatccataaaaggaagggcacacagcatgaacaaaataccatagaaaaaagttctccgggtggtaatgatggtatcatatccaaaaccggctatttttctggaacagatggaatatactccccagatggctgccgctgccacaccaaggaaatctcccagtggatttaactctactgtctcccctttctggaatgtgatcagacagatgcctgccattgcacacacaaatcccagaacgatactcttcttcattttctccccttccaggaaaaagtgggccagaatacctgtaaaaataggggcgatcgatacaataacgctgatattcgatgcctgtgtcaaagtcagggcaatgttttccataagataataaataccgatccccgtaataccggccacgatcatgatcccttcctgtttcaggcttcctgctttcaaaggaaccgggcggataatccacaggaaaatataacctgccacaaaccgcagcaccagtatttcaagaggtgacagatcttctaacaggactttcgtcgatataaacgttgtcccccagatcagcatagtaaagatcgcagccagatgtccggctgcttttgtcttttgtgcactcatttctttgctccttatcccttttcatatttatatactatataagcctattaaaataaagccctgtggatcccttctgaaatagtaaaacttaactggcgtactctctcatcaatatccggcggtgttacataaagagaaccaaactccggctctaaaagttctgtgatcagacggtactgatcttccggatccatgttctggatccattttcccgtatttttcgtttctgcctgggatgacagtaccccaagcaaagcggagatcgtatcatgaacaatggctgccgcacctactacggtaggaactccaatcgcaagaaccggtattcctaacgtttcttttgtaagactgtgtctgtgatttccaactcctgacccgggatgaattcctgtatccgtcagctggatggtggttccaaggcgccggatgctgcgggctgccagagcgtcaatggcgatcaccagatccggctgtacctccttaataatgcccaacaggatcctggcagtttccattcccgtctgggccataacaccgggagctatggcttttaacccttctgcagacacgcagagattactgaccgtccggggcccaagggagtccggggttacgctttgatttccaagccctgctaccaggatatttttcccggtcttctgctttaacagtccttttaacaacaacgccagttcatcagatacttcactatgaaaatcttcatcaggcataagcagtttatctgcttccagtgtaagatagcttcccatcggttttcccaaagctttggcgccatgttcatttaaaaccttcacttctgtgatctgggctgctgaccgttttccttcccactttttaaaagaaacccctgaaacttcttccgctgcttcttttaaaccttcccgttcctctaaagcaaggtctgtacgtattttaaattcaggtatcttcatttttcgctgcctccttgttttgtcctgtataactgtaacgatcgttaaaattagtttttacacagagacagcgtattatgccacatggattttattataacttacagaaatagaactggcaatcagaaacatttcctgcattggttcatgatactgtagaccgtctgcttaacattcttgataatttttaaaatttttacttgacatttccaaatggatccgatagaatgtaacagtatgtttacattgaactgtccgtgtccaggctttgatggaaaacacaacgattaatatttttatataataccgaacggaggtgtatttcattggctaacattaaatctgcaaagaagagaatcttagtaaacgaaactaaggctgcaagaaacaaggcgatcagatctaaggttaaaactgcgatcaagaaagttgaggctgctgtagctgctggagataaggctgctgctcaggctgcactggttgctgctactaccgagatcgataaggcttgcaccaagggtgtatatcacaagaacaatgctgcccgcaaagtttctcgtgtatccaaggctgttaattctatcgcttaatttatagaattcgatcaatcgataccgtaatttaaaaactctccggattaacccaccggagagtttttttgttattcagagcaatgcgaaaatgcagggaaaagtgtggatcatgcttgcatgaatgaacacttttccctgcattttcatatgacgagcagccacatcgagatgcagcgcagcgaaatcgagatgtttgctctgaataattgtactttccctacatctgctcttcatcataacgtgctctgatgccgcctacaaatttcaaacgggtccttgcacatactacgtgggcaccaccaatggcctttgtctgaattcttacaggcacagccacatctctcatatgcataccgatcagagtatctccaatatcaattcctgcatgtgccttgatatgttctactgcaaccgggtgttccagggtatgataagccgcggttgagaaagaaccacctgcctttaactgaggaactacattgaccggttcatagccgtatttctccgctgcctcctcttctaggatcagggaacggtttaaatgctcgcagcactgcgcagccagataaattcccaatggctttaattcttcatacagtgctttgtatacagtctgtccaatggtctcactggaatgggagccgatcttgtaacttccgatttcgctggaagaacagcctactaccaggatctgacctggtttcatcttggcaacagccagaagttcctttaaaacttccttggtctgtgtgcggatctcttctaacacttcatcactttctttttccgttgctacccctggtatatttttttcttctgccatttaatgcattctcctccttaattctaatatttattagcgatcagcagttccactgccagacggtcctggagttttcccgttttcacactttcttctgcgtccacacacaaattcacataggacaagatctgttccttcgtaaatgttttcgcctgcgccattacttttcctgtaacaaaaggctgcaatttcaatttagaagagatcgtactcctatccattcctcttcccatcagttcctttacctgcaggatctggttaaactgccttgcaatgagaaacaggatacgcatagacggctcttttaatgtaagaagatcttcataaagatccattgcctttcttgtctgtctgttggcaatggccgtgatcatgtcaaatattttgttcgtcacctgggtaatacacactgcatcaatatcttcttccgttataatatcccgtccaagtgtataactgatcaccttatccagttcagaagtaatattttccatatcatctcctgtttttcccaggaaatattccatagtccggccagttatcttttttccattttttgccagtattcctgctgcccatcttccaagctgggcactgtcctgacgcaccatttctgcaatatagccatacttttttacagccttatacatacggcttcgcttatctacttccgtttccacaaacaaaagacaggtcgtatccggaatattctctatataggcgcacatttcatctgcccctggtccgcctttaaaccagccgctgtcctccataaggatcagacgtctgtcagcaaaaaaaggcattgtatcggaaaggctgatgatctcatttacatttattccctttccttcataataattataattcatggtatcgccctgggtaatggcttcccgaaggcggtttttatagcttttttttaaaaatgcttcttccccaaagagaagatatactttcttaaaatcattattttttatatcctggttcagggtctgcatgtaattctttttgctcctgttgattagttggacaccttatactcaggttccacacggatgtgtttcactgcccgtttggcagctgcatgtatttctccgcgtggctacattgtaacacaccagccgcataatgttaaggcttgacttttgttctcatctgacgtactctattaaatagttttttttagaactgttttgtttaaaactttttatttttcagaaaggagtctcctttatgatctgtattactgatttccttgcacatatccggctgaccatgaaattgcaggaacagatgttaaaaaatatctgtgaaacatggcagctgaccataacagaaggaaaggttatttcatttctttataataatccaggaaaagatactgctgctgatatcacagaacttcggatgctctccaaaggaaatgtatcccaggctgtagaaagtctgatccagaaaggtctgctaaagaggaccgctgaccagactgaccgtcgaaagatccatttatccctgcttccccagactgcagacattacagctgccatctgttccatgcaggcaaatctctacagccagatcttttgcggtctgtctgaggaagacttgaaattttatgaacagatcaaccaacagatcatggaaaatacgaaaaaagcgatcaaagaaaggacgacagaaaatgaatttacagcaaaagaaagataacagctttcttgcaacagaacctttggggaaacttttgctaaagctctccctgcccacagttacagcccaaatcatcaacatgctgtacaatattgtggaccgtatctatattggacatatcccggaaaacggagcactggcactgactggtgtaggcgtgtgcatgcccctcatcatgattgtttccgctttcgcggcccttgtaggaaacggcggcgctcccagagcctctatttttatgggaaaaggagataaagagtctgctgaacgcactcttggcaactgttttaccacacagatcatcgtatcccttttgctgaccatcatcctttttaccggaaacagaagctttcttatggcttttggtgccagtgaaaataccattccctacgctgttgcctatatgaatatttattcactgggaactatctttgtacagctgactttgggtatgaacgcttttattactgcacagggatttgccagaaccggcatgttgtctgttttagtaggcgctgccagcaacattatactggatcctgtttttattttcgtatttcatatgggcgttcgtggtgctgctcttgcaacgatcatttcccaggcactttcctgcgcatgggtgttaaacttccttacaggaaaaaaatcgtatctgaaaatccgcagatgcaatatgaaactgcaaaaaaacattatccttccaagccttgcactgggactttccacttttatcatgcaggccagtgaaagcattatttccgtatgttttaactcttcactgctgaaatacggtggagaccttgcagttggtgctatgaccattttaacaagcgccatgcagttcgctatgctgcctctgcaggggcttggacagggcgcccagccgatcatcagctacaactttggcgcaggtcagacaaaacgtgtaaaagactcctttaaactgctgttaaagatcgacctttcctattctacttttatgtggcttttagtcatgctgttcccggctggttttgcttcgatctttacctccgaccaggcgcttttaacctttactgctcatgcacttcggatctacatggcttccatcctgctgttcggcatccaaatggcctgccagatgacctttacttccattggaaacgcaaaagcatctatcatagtcgctgtcaccagaaaatttatcctgctgctcccgttgatctacatcatgcctcacattttcactgcagatcagacgtccgctgtttacatggcagaaccgattgccgattttctggccatctgctttacaagtattttgttcaggtttgaatttaagaaggcgttggcgagatagggttgaggtaataacagggcttaattgataattctttatttgatcagatattttcttttaatatagaaaactgctgccatatcccaggggttttagttcctgggtggcagcagtttttgaatttgtgttttgtgttatctttcgtggtattttttgttttatcttttgttttgtgttttgccctatattttgttctatattttgttctgttattgatatgtgcaatatgctgctattttattttttactagcttttccattttcttccaaaatatattgcagcaatccctggcaaccttctgtcacatctttccaggtagcctcaaaatcccctgtataccacggatctgccacatctcggctactgccggcaaaggacatcatcttaaatatttttccctccggatctccgccagtgatccgctttatattgcggatattccattcatccataccaataagataatcatacccatcataatctgcccgagtcatctgtctcgcatgatgcccctcacaagctatccccgcctgagcaagcttctcccgtgttccacgatgaaccgggttaccgatctcttccgtggatgtggcagcggatgagatgtggaactggtctgagagattggatttttttaccagatctttcattacgtattctgccatgggggagcggcaaatgttgccgtggcatacaaataatactttaatcatctttttatatctccatttaaatcttgtatttcttctcaaacgcttgatatttcagggttttccgacttttgagttttcctttcttttcaaggtatcttctcaaatcttctcatattttcttatgcttttccctgcaatcttggtaaatccattggtaaagcaagcgtccttaccaacgggcttttttaactattcgctatccgatatacttcttcctttgcatcatcaaaattcacatgggtgtaagtgttcaaggttacactgatgtctgcgtgacccatgatatactgcaaggttttcggatt

SEQ ID NO: 3610 - DNA, 275 bp, Unknown
  gut microbiota DNA sequence
tatcttctgtaagtatatctttcatggcatctgccagtggctgatatttccatgggcggtctttcatgacaagatactggtaatatccctgtctgctgacatggagaaccctgcagaaaaaggtaatatttcctttggagctgccgtcttttgtttttaatgcaataaacttcattctttcgtttttgctgacttcagacggctcgcggcgaaaaaagcactggcttcctcaagaaagtcgttttctttctttaaaagtctgatttccttctcca

SEQ ID NO: 3611 - DNA, 729 bp, Unknown
  gut microbiota DNA sequence
tatgagtatcttcaagatattgcaggttatgcaggatggacatataaatacataacaagtgattggaaaaactgctttacacagttggaaaatggagagattgatattcttggtgacatttcctatacagacgaacgtgctgaaaatatgcttttttccgatatgcctatgggggaagagaaatattacatctatacggatgcatccaatatggatcttacagcaggaaatttggattcttttgagggaaaaaatattggtgtgtctaaagataatatagaggaggatgtgcttaatgaatgggaatcaaaatatggtctgcatacgaagcatatcaatgtttctacaaccacagaaattatggacaaactgtcgaaacatgaaattgactgcttcgtttcggtagaagaatcccgttgggaagaatcggatatttcaccgcttacaagtattggagagacagaaatctatttcgctataaatccagaacgtccggatatcaaagaagcattggatagtgctatgcgcagaatcaaggatgacaacccattttacacagatgatctctacaggcgttatctttctgcacagagcagctcctttctttcaaaagaagaaagtgagtggatcaggcagcatggtgcaatccggatagggtatctgaatcaggatggaggtatcagcagtgtagatccatcaacaggtaaactgacaggtgttattacagat

SEQ ID NO: 3612 - DNA, 1673 bp, Unknown
  gut microbiota DNA sequence
ccaaagaatttgcttatgattttaaagcagtccgctatctttcaacgggatcccagtttgttgtaaaagagttggaccgatttttgcatatgtactgtgacggtacaaccggcaccgcaaaaacatccagtgtgctcacggttgccattgcggacgaccttgatcagaaagtatataacgaggattatcagaaaaaagcctgctacaaagccctgaaagaggggaaattacggatttgcgccccattcaatggaactgatttttccatcaattactttgagccgatacttttagaaaatccaaacgcagacaaacagattgaaaaagaaaatgccagcagaagagagttgtaccggcatctcaagtttgactctcaatccgctggcatcaccgtggttgcgcccaatgcggcatgggcggatcagtgctaccatatggccaaaaaccgcaaactgaagatccataggattgacccgattttaaaagacagaaaacacaaagaaggtttcaccggcttcaatccttttaaaatcgatcccgcactgaccggaaaggagctggcaaccaccatcacggcccaggcctccaatttcgctaccgtagtccagtccatttatgaccagtcaggcgtatccgatccttatttttcgagtctcaacgaaacagtaactgtcagcatagcagaactattaatgctgacttaccatctggtgcaccccggacaggttcccaaagcatccgatgtgcagaacctgatcaacgactgtagtcgctgccgcccatatctggatgcacttattaagcactattccgttcacagcgtcagagacagcggaaatgaccgcacagaacaggttgctgaagttgtggatgtagggcagtggcagcaggtatacaccactatcaacaatgaccttctgggcgaaaataaagcaaatatgtacgatcgctgcaatggtctgcgaaacctgatcaacaatttcctaaatgatcctctggtccgcgatgtttttgaagcagaagagaccgttgatattgataaagccctggagtacggtgagatcatcatattaaattatgcccttgagcgaggcgattctgtggcaaccggttttggcctgtttttcctgctttcctatgaaacggccgtcctcaggcgtcctggatcagaaaatgaccgtatcaaaaattttatttacatcgatgagcttcctgtgctcctgcatccgaaactgcaaagtttcttcacactgttccgccagtaccgggttgctgtcatctgtgccatccagacactggatcaggtaaagaagatacagcttgacagcatcatgctcggtaactgcgcacaccagatcatatttggacgcgtaagcaccacggaaatggatatcttttccaaaatggctggcgagaccctggaacacgtcacacaggaaactgttacggaaacagcaatcaccgcagagctaccggcttactcatattccaggcgctctacacctaccttatccgaacgtttttctggcacggtattccggtatttgggctttcaggaagttatattcttttccgtaaacaattcttcacccatttatccctttaggggaaaagtgaattttctgcccaaaccgagagagaagagcgccccaagactaaagatcgaatgggag

SEQ ID NO: 3613 - DNA, 2328 bp, Unknown
  gut microbiota DNA sequence
gatgcagaagatcaaacgccagtagagccgacccatatcataacccccacggaacacaccgatggcatcttcttcggtgaatgaaaatgaaaggaacgcgaataccaccgcatataccatgtcctattccccatttcgatttgatagcaccacaaccattaaatccattcaggtccctagatcatcaggagcatggcaatccatcacaaaaaatgaattgtctgatctggaactgctcatcctatccatagtctatgagctgcagtattgtaccgcatctcaggtaagagattttctattgttttgtgggtgtgaaaacagattcaagcgtttttccgacggaaacggtaatccctatcgaaaccccatccatgctctgatacgcaaaggattgttgatcccactttccatatttcgcggcggaacagcaagcggaccgtctatcctgcagttaagctcatttacaaataaattaatggaattattattcccgcatcccagaatttttgatcattttccaaaccgtactgcaaatgatccatccacaattttaacagttctggtccgcaatagcgcctgcatcaatattctgagaagcaatcaccagatattccttgcgcaggccattgagaatgccccatctattccccatatctgccttaagacgcgtttgcaggggcagatcttagtatttccctaccgttcaaataaaaaggcattaaaagcggaactggatcgtcaaaatgccacttcctatcagacatgcatagtgatcgccgaaactttagatgatgcaaggaaattgaaccactttctggacaccagccattttaaaacacctttactctttagcaccgatgcttcgctgaagaacccagaaattccacttcttaaacacttataccaattcacgaatgggcatatggagtgcctggcactttctgatacctaagaaagatcgaagcttaaatcagtaaccgtttcaataccacaggaggacaaaaattacgatgtatttgatatgtttcttacttttcttgtttcttgcaacgcttcttttctgcattgtacagaacaaatccccatatgaccaggctattgatgatttagcacaggaaaccgttctaacgcagtattgtacccatcgcaatactaaatatcgctgattccttctgttttcgtccatgcacggcaatgtggtgatagacgatgaaggcctggtgttcttcacagtgtttaatgcctcttttttgtattgatgcaactcgcaaataatgatagaattggtgaagcaggatcatgcctgacaaatggcccaccactgcgtgtatcattcggagcatgatcttttctggaatactggccttaagaaggatatgaatatgaaaatgaccttaagaagtcccagagccggcgttgtggtagagcggttcggggacaaaagaaagtatctatacaaaattgttgagaacaacccactgtgcttaatcaaaccctgaacaaccttacttcccctggcagaaataagtgctgatgcaaagatcatcggcccggacgggcagcctgtccctgcaaccggcgaatactatatcactgcagaaaccatggatccgtaccatatcgtaacagattggttttaggagctgcaggtaaaagacatataagcccaatggactttgtatgtcttttttgtttctgattgccataagattgatgcctttctctatgcaaacgtcattgttgcagcgcggtctccgcataacttgatgtgcttctgggaaccattactccataaaggaggactgcgaagatgtcaatgatcaacaaagaaataaatgatttttctgttcaggcttatcagaatggtgaatttaaaaccataaccaaaaacgatatcatgaaagaatggagtctctttttcttctatccggcagactttacctttgtatgccctacggagctggaagatcttcagaacaaatatccagagtttctaaaagcaggatgcgaagtttattcggtctctacagattctcatttcgtacacaaagcatggcacgatcactctgagcgaattggtaagatcgcatacccaatgctggccgatcccgctcatgtattatgtaaggactttggggtattgattgagtccgatggaatggccgagagaggaagcttcatcgtaaatccagagggaaaaatcgttgtatacgaaataaatgcgggcaatgttggccgtaatgcggatgaactgtttcgccgccttcaggcatgccagttcgtagcagaacatggcgatcaagtatgcccggccaaatggcaacctgg

SEQ ID NO: 3614 - DNA, 394 bp, Unknown
  gut microbiota DNA sequence
ccatcactgtttaccgccagatccaggacgtttggcaggaaattgtcggtcaggaaggttttgtcagaagcatcatactggtcgatgatctcctgtggggaggtgtaggaaaagttgttggaaaaataatccaggaaagcccagccgatctgaaccagtgccggggtattgccggtagcggcttcagcctgcaggttctgcatcagtcccttatacatatcagggttatatttagcaacaacttcaatgtggtcattgttctcattaaagttttttaccagttcatctacggtcagtccgccctggttctctgcattacagtgccagtactcgataacggttttggaaccattgccggaagcggtgctctcggcggaagtggtggcttcggaag

SEQ ID NO: 3615 - DNA, 1177 bp, Unknown
  gut microbiota DNA sequence
tttttttagttcgatataggttttctgatattctgtcattggtcgcacctcccatcaatcccaccagaaataccagacagtggactgccacaggacatctgccaaggagccaatgcttccatcctcattctgatccagatctgggcagaagccatattgctccacagccacttccatagctctttccttggagatcggagtcggaagttcaaactccaattcatcgtggctcatggcggcagggatggcaccatgctgctcgaaccagtatttcgccactgccatcaggtccggcgtgtcggggcactcattccaatttccaaagggcaggtaggcgaagatctcccaggggttctttaccggaattttagccagaatgagcggatatgtcattccggtatcatcgttccaatagtttgcgaagcggtcgttgggttctccgccctccatctcgcccaggacttcctcatcccagtccagatcatcgtcctcggcttcttccttgcgctggccggtcaattcctccaaaatcgcctttccgtccttgatgggagcggagagcaccttcttccggtactccgttacggttttgaggtcaaattcatagaagtccgcgtcatgctccgaatcggcgttcattaccagacactccaacagcgtttcatcatccgcctggataagcacgggaacaaagccctcccgtacccccagccgctgggcgtagctgtatgccgacatgatggggtcatcatctgccatggatgggaaataggtacactcgcagtccagatactccatgatggcctgagccacctcggaaggctccagcgtgtccccgtcgaagtcctgtccttgccagttggtgaagcgttcctcgatcacctctgccatagcctgatagtagtcctcgtcaaaggggatgaacaggtaggcttcatcctggaactcatcggagtgataccgctccgggccgaagaagcggagggcgttgtcgtcaacatcggcaggatagtaggggctgtcgccctctccgtagtaatagcctgcaaaggcacggccttgctgattgaacagcacagagaacagacagccgtccagctcatcccggataaactccctcagatccacattggcaggatcagctttgacctgtttggtcacttcgctgtattctttc

SEQ ID NO: 3616 - DNA, 1307 bp, Unknown
  gut microbiota DNA sequence
atcggccttggcatctgtgggaaccagaagctggaagacatcctgaaacgggccagcgaaagcaatgtctgcacctaccgtatcatccacaatgtacagaaggaagacgccgtgatcttcagcggagaaaacggcattgacacaacggaaaagctaaaagagctgatcttaaagacttccgccacttccattcctgtaaaatttgtggcttacgattattaccggctgatgaaaaacggcagccatgatgagattttccagcaataccatgtaaaatgcatcatcggacttttcaatccggagatcgagggaattccttttatctcactggaggacattatttccatgaattccgcagaaaagctgacaaacattttctcagagtacctggatgaagaacaaatggaaatatttaaccagaacctggtaaagaatttctccctgcagaatgtagttgaatctattaccattttaaatcctgacaagcttttagatgaagtagaacaggcagtgggacggcttcagaagatcacaggaagaaagatcgcaggacgtatcatgatcgggctttatgtccacctgtgttgtctggtggaacgactggtcacaaaaacacctattgataattatcaggatctggaagaatttgaacaaaaacatgccgactttatcaggcaggtaagggacagctttcaggatatctcccggcattaccgggtggctctgcctgtaagtgagattgcttacatttatgattacatgcatttgaattcaaaaaataagctttccgggcaggcagaaagcccggccgtccgtgaggacgaataggaggtaaatatgggtattgtacttgcaagaattgataaccgtcttcttcatggtatcgtggctacacagtgggccggacgttccggtgcacagcgtatcatgatcattgatgacactgttgccaataatgaactgaccaaagccagcatgaagcttgccagacctaccggaatggctatttccatcattaccgaggaaacagctttaaataacttcaaagccggaaaatacaatgaccacactgtatttgtcctggttaagaagccggaaacactggttaagctgtctgatatcggcgtaaagatcccggaactggtcattggcggaactgtaaagcctgctgaaggcgaagaagctgtaaagctttcccagagagcttacgcaaagccggatgacattgaggcttacaagaaattaaaggctgcgggaaccaaactctatgcacagtatgtacctgcagacgcagaagtttctattga

SEQ ID NO: 3617 - DNA, 221 bp, Unknown
  gut microbiota DNA sequence
agtaatccgaacttcgatcaactttttaacatgagagtttgatcctggctcaggatgaacgctggcggcgtgcttaacacatgcaagtcgagcgaagcgatttaaatgagacttcggtggattttaaattgactgagcggcggacgggtgagtaacgcgtggataacctgcctcacacagggggataacagttagaaatgactgctaataccgcataagcg

SEQ ID NO: 3618 - DNA, 3665 bp, Unknown
  gut microbiota DNA sequence
agctctggattcagcatgtaatagtaatgatcctggaaccgatcatagcgggaagcagctatccgatgagcttttcatcgtttcctggaaggggttccctgaaggggcagcgagctatcagacgttggatcgaaagcggaaaggggatcaggaactttgcacaggcagatatccggcatttttatagccatattcagtataaaattgttcggaaaaaattagagcgtagagttaaagataacttttttctacatctgattgatgtctgcatgacatattttcctaaagaaatgcctttaggtttctatctttctcaatggcttgcgaatttcatgctccaggaactggattatgacattaaatgtaagctgaaaatcgcacatcatgtccggtatatggataattatacgctggctgatgataacaaaaagaagctgcaccaggctctgatttacattcggcaggtgcttggaaagatgagactacgcatgaagagtgactggcaggtgttccgatttgaatacaccaagaaaaatgggaagaaaacggggcgctgcgtgtcggccatgggctggctgttttaccggtcaaaagtgttgatccggaagcgcatattacttcatgtagagcgcatagcccgaaaattgcataaaaaggaagaaaacggccagcggtttccgctggggctttgccgtggttttgtatcgttgctggggtggatcacacattcagaaacgtatgactggtatttgatacatattaaggaattggtaaacgtccgtaaaatcaaacggattatttcaaagatgacaagggaggtaaatcgtcatgcaggaatggaaaaaggaactctgcagagagcagcctgaaacccttcaggagcttggaaagggcacttacattcagaggcgcaatatcactccgtatgaaagaaaagacgggaacggagaagttgataagggttattcatgtgagtacaggattcttacaaaagaagaatatttttcagccctggagcaggaaaatagcaataaaaatatgctgacttccatggccgctcaggcagatatctatgaaaaacttattgaaacagaaaaaaatcagttagtcatcatgcaggccattgcagatctgtatgaaaaagagaatggaggcgtgtaatatgttagaactttatgtgactttagttaaagctggaatcagaaccattgacagcgtaccggcggccttccgtgaaaaggtgaaagcggctattgaagcggaaaaacaggaatgataggaagggagaagaaacatgactctgcttcatattatagacacgctttgcgatgtgacaaccaagcaggcagatctcctccgggagctggtaacagatctggaacatatgaaccaggtttccgaagaagtaaagaattattatcgggagaagctggattctattgatcaagaaatgaacgtagctgaatacggctgcagagaacttccttatatggacgaagctcacagagaaataataaggtaaaagcaggtgcatcggatgtttccgatgtgcctttttaattggaggaagatcatgcaaagagagaagtggaagaccatggatgtgatccttgtaatcttggcgatatttttacttgtttttgtgattgcaatgattgctatttacataaaaacagggggaatcccagataccttatgtacctgcgtgtttagcgtatgcggcggagaatgtggagtaatgggctggatcaagacaacgaaagatagacatctttccagacaatatgaactggaggatagggagacagacaaaaaagaaagaatggaggaaagagagaatgagtgatatttgctttgaaggtttaaaaattttggtgatggtggcggtgctggtattaaccagatatgtgcttccttgggtaaaaagtaaggctgattctgagaagctgaacctggtagcccagtgggcgtataaagcggttttaatggcccagcagaccatgaaagccactggtggaaaagagaaaaaagccatcgttacgcagtttttaaaagagattcttcaggagaagaacatcgcactttcggacgcacagattgaaattctgattgaagctgcggtaaaacagatgaagcttcaggaaaatgcgggaattgtgattgaagcaacggatgatgtggaggtgtagttgacatgggagtaagagttggaagcgcaagaagcaatgaaaatggtggagtaaacggtggcaaggcgggtgatcagactggcagagaggtgtcaacgcagccctggtatctgcattcaaagggctggatcgttattagagcaaagtcacctgcagtccgggaggcaatcgctaaaaacatggaagctgcctgccagaataacaatatcggttattgccagggacacagaggaacggcaacggcggcagcgaagccatatacttacgatctttccaaggtgaatacagccgtggagacagactgctctgaattggtacgttgctgtgtgctttatgcaggtattcatgtgaatggttttagcacagcgaatgaggtggacgaactgaaacagactggccagttttatatcctggaagaaaataagtattgcaaagctgcggactatttgttacgaggggatatcctggtcacaaagacgaaaggacacactgtggttgttctggacaatggttccaagagcagccagaataaaaaagttgaagcagctcagaaaaaggatgtatctatcagcggaacctataaaaccacggcagatctgaatttgagagcgggagccggtacaacaaaagatattctggttacgatcccgaaggggacagcggtctcctgttatggatattacagcctgtacaacggaaagccatggtattatgtaaagactactgtgaagggagtagcttacacgggcttctgtagcagtgcgtatttaaaacgttagataaatgaaggctctgggagtacgagctcccggagcatcctgatttcatgccccttaaaattgaaatcaggaggacataatgaatagttttattgcatggatcggtggaaagaaattactgagaaaagagattgtaaaaaggtttccagaagaaggctttacacggtatgtggaggtttttggtggagctggatgggttctttttgaaaaagagcagggaaaagaactggaggtattcaacgaccgcgacagcaacttgataaacttatatcggtgcatcaagtatcattgcggagaactgcagagagagctggaatggctgactatatcgcgggaacagttctttgacagcaagagccagcttgacagtcaaggacttacggatatccagagagcggcgcggttctttcatattataaaggtgagctttggttcagatcgcagaaccttcggaacgaataaaaagaaccttgctaatgctatcgagtaccttcccctcattcaaaagaggcttcagagtgttgtaatcgagaacaaggactttgaaaacctgattcgggtttatgatagaccaggggcactcttttatcttgatccgccttatcatgggacggaaaaatattatgagggaagcttcactgaagcggatcatgagcgtttaaaagccgttttaagcagtatcaaaggccgttttatt

SEQ ID NO: 3619 - DNA, 1272 bp, Unknown
  gut microbiota DNA sequence
ttctcttcttccttcgcttcatgccctaaaaaacctgcactcatgctcgcctgactcatcagttcctccagtgataaagccggcctgtcgctgtatgtaggaaccaatattttctttttatgagcagagtgtgctccttcaggacatatctgtttatcatctttctgaccaaattctaccgctactgacgcaaaaaacagataaggaatttcatcatatatacagatatcttcaaagaactgctgtcgctcgcgtccttggtaagcaggtgcagcacgaagtttcttcagacaatcctcatacctttttgccgaacacacctcattctctattaaaatggcatccagtaaactccgcagaattttcctggctgccaaggcatgttgctctggcagtattccccgatttccatttaatatatgatccagcaacttttctttgtcatataggaatgaagcagaggtacgcttcctggcatctttgaacgctttatataattgttctccaaccggtaatacataccctcttatgtgccccatctgttctaaaatgatgcaaacctgcatgtgaaatacattttttcgtatcattgaaacagtcggattatgaaacatataacgcagcacctgcagttccgcgttaagctgacaattacaaaaatctttcgagaattcacatattttgcaaaaatctactttctgacattccggttcaaagtgaaagtttgtatccacttcttcgcaatgaaatgacagttccccatatgtctggtataaatcggaaatgtaggctgattcaggctttgtgtctactattttcatgctctttaattcttcaaacacataatcacactgctccttcgtgtatccacatgaagcgcatttctgaattacatagatattttttagtgcctgatctgctatccacgccaccttaaacaggcatgggcatcctttgatatagtgcatttatttacctttctgctgcattcttaaaacacataatactttggaattttgtcacatcctggtaccgggtaatatggcttgatcacatgcttcccctgccgcatcagttcactcacctctgccagttcctcctcttttccaccaatcagaccatattcattcagataaaacaaggtgaagcttgcaaattcgaggacacgttttgcatcctgctttcctgcagttgaggtctttgtaattttgtcataatgtctcttcttatatggaataatttctttcacctgaacaaacccggtaatgcaac

SEQ ID NO: 3620 - DNA, 705 bp, Unknown
  gut microbiota DNA sequence
tgagcgctgattttacgcacctttccacaaaagaatgccgtttctccaatctttgtcctacgggtaagtacaagtgaactgttgattgagatcagcgcaccatctgggtcctcatactgatataagccatattcatactccatctgggaaagcacagcatccgccgtcatttgccctgtctgtgcacacatttcgaatgctctggcggcaatgatcgcgtttagggctgttagatcaaatcgcttccacttgcacaagtcaagcacttctcctgagtatatgcctgcttcctttctggccccttttttgcacttaaaggcaaccggtatggaaaatccatgcccatagatgaacggaatgataccggcggcttccgaatacttagcaagctgctgaacgtattctacgcatgctgctgcatgtctgccacgtaaaaactgaagttccaaattttcattgatagtcacttccgcctcatcctctctgcagcagcaccgcagcacctttcctgtttctaattctcttttgatcctggaacgaagtgctaaatgatataataccgttggatataaatagcgtccttcttctttttcacctaatttcaatactaaaaaaccgattttctgcttcaatacagcctccttaaattcttttaaaaaaaactgcgcatggctgtgacaccatacgcagctaaatctaccttct

SEQ ID NO: 3621 - DNA, 300 bp, Unknown
  gut microbiota DNA sequence
acccagccatctactgtaacaccaaaagacggttacagatttgaaaaatggcagcaggatgatctgacattcttcaatagtgatgatgagctgagaaattctgaatacctggaagatcaaacattcattgcacactttactgtaagaagagatcttcattatgagatccattacttctatgaagatgccaatggcgttgtaacagaagatacagcagcagcgattgtaagtgatatcggtgtattcggagaaaagatccttacgactacagtgccaaaagaatctgaatttaacggaaag

SEQ ID NO: 3622 - DNA, 19236 bp, Unknown
  gut microbiota DNA sequence
ggtttacacaaactttaggatactcccaattatgtgtacagcaatggcagtctggcagcacagccgtgggtttctcatgtagaatccggtgtttcctgtaacctgacagcagaatctcctgcaatccagggattcacaccagatcagacaagtgtatcctttaatgatgcatatacaacagaccagactgtgaacgttacctacaaaggtgcaatagttaattacacagtaaatcattatctgttaaatgtagatgatagaaagccagctacacctgcagatacagaaatagtgccaggtgaaaccggactgacaactgaagccaaagcaaaagagtatgcaggatttacaccacaggctatcagtcaggcaactgtaaatgcagatggaagtacggtagtagagattttatatgaaagaaattattatactctgacctggaatacaggagaaaatgcttcttatattgcacctgagcaggtacgctatggtgcagccgtaacaaaaccagacaaggatccgacaaaggtaggctatgaatttaaaggctgggaaaatcttccggagaccatgaccatgaccatgccggcagaagatctggtagttactgcgaaatgggaagcagcaaagagagctgattacaagatcatttactggaccgaaactgtaaatgaaggtgtttacactgtaaatcatgtgataaatggaactggtacagtgggaagttctatcccgaatggaagttatacagtaccgaagggatatcagacaacaccagtagcaggaaaaacggatggtgatgtgaagataacggccgatggaacggcagttaagaatgtttattttgcaagagctacgtataccattacgtttatgagatggaacagtcggaagtggaagtggaaggaagatgaaagtttaaggatcaccgcccgttatggtgtagacgtatctgcgaaatgggaaaccgcctgtgcagatgacggctggggaccaaattcttctggaaatatacagtatacgcttttagcgaatatgccagctgaaaatctgaccatgtatgaaaaagatgcaggttcaggtaaaaagattatttactatgtggaagggttagatggagaacgaacaacgtacaggacatttgaagcttcaagtaatgtacatttaactaaagaagatcagatgtcaattactggatttacgtattctgactggaagcagtataatgaatggtacgaagaacctgttctctggctctattataccaggaattcctataatcttcgctttgagaattgtcagccaatggatccggaaagcatcaaatttgaggcaaaactgtccacaggcaaaccttcccgagatccaggaagaccttcatatgtagattctgattatacatttgcaggctggtatctggatcctggctttaaggaaccggtaaattggaatgagaccatgacagaagatggacttaccatctacgcaaaatgggaaaaaccgaaatatacagttgatttcgtaactaattgtaaagaagaaaaagctagtattaccagggaaaaaggttttgttttaacagaagaagaactggcagcaccggacaaagcagatgatgaattcctcggctggtatactgacagcgcacttacaaagaagtttattccagagtcacagatcgtaaaggatacaactttatatgcaagatggagaaactctgatacagtcacatatactgtgaaatatatgtgtggtgatgtagcgattgccgatgcgaagcagcagactgtaataagaaattccacagtaagtgaacctgctgaaacagtagaaggatattatcctgaaactttatccatcagtgcaatgatcacaaaggatggacaggagatcatatttaagtatagagcagtacagagctggacttatacagtaaaatatttactggagggcactaaaacaccggtacctggaagtacagttgaaacaggtactaccagtgaccagaatgtaatgataacctttaagacatttgaaggatatacattaaaatctgatccagtgcagaaagtaacccaggagaatcaggtagttattttctactatgtacctaagactgcaatttatcatatacagcactggtatgaaagaccgaatggtgaatttggacttcgctatattgatacattcaatacagcagcaggacagtccgttacaacaagaggacaagaaataccagttgatggatttacgctggatacaagtattgctggaacagtaacagatggtactacaaatattcaaaatgtattatccctgaagctgtattacaccagaaatacccatcaggtaagttatcaatatgaaggtgatgttccaacaggtgcaccggcagttcctgatgtagcaaatcataagtatcaggcacaggttacagtagcagaaaatccgaatgtaacaggatatattttcattggctggacggcagcaactgaaaacggaacagcagtgactactacaggcggcaaatttgtaatgccggatgcaaatgtggtactgaaaggttcctttacagcagcagagcagaattatagggtgaaatatctggatgaagatacaaaggaagaaatccatacaatgtcagatccaagggatgcacactttggggatgtgatcgagggttatacagagaaaattgaaatcagtggatatacctttgtaagagctgatgaccttacagtaggaacagacaatgaacagaacattgtaactgtatattacagcaaagatactaatcatgatgatatcccggataagtatcagatcacattcacctatgtatcagcagatgctgataagggaactgtgacaggaacaaccagtgaagtggctactacttatgaaatcaccagagatagcgtgactggcgagatcatagtaggaaatggcccgacagcacagcatccgacccagccatctacagtaacagcaaaagctggttataagtttgacaagtggacagatgaagatcagaaatctttcgatgatgatgcagcactgaaagcagcgtcttaccttgaagatcagactttcacagcacactttacagcaacagagcagacttatagggtgaaatatctggatgaagataaaaatgttgaaatccgtgatatgtcagatccaagggatgcacactttggggatgagatcaaaggttatacagagaaaattgaaatcagtggatatacttttgtaagagctgatgaccttacagtaggaacagacaatgaacagaacattgtaaatgtatattacagcgaagatactaatgaggatgatatcccggataagtatcagatcacattcacctatgtatcagcagatgatgataaaggaactgtgacaggaacaaccagtgaagtggctactacttatgaaatcaccagagatagcgtgactggcgagatcatagtaggaaatggcccgacagcacagcatccgacccagccatctacagtaacagcaaaagctggttataagtttgacaagtggacagatgaagatcagaaatctttcgatgatgatgcagcactgaaagcagcgtcttaccttgaagatcagactttcacagcacactttacagcaacagagcagacttatagggtgaaatatctggatgaagataaaaatgttgaaatccgtgatatgtcagatccaagggatgcacactttggggatgagatcaaaggttatacagagaaaattgaaatcagtggatatacctttgtaagagctgatgaccttacagtaggaacagacaatgaacagaacattgtaaatgtatattacagcaaagatactaatgaggatgatatcccggataagtatcagatcacattcacctatgtatcagcagatgatgataaaggaactgtgacaggaacaacaagtgagattgctactgtttatgaaatcttcagagacagtgaaactggtgagatcacagaacttggcccacagacacctcagcatccaacccagccatctactgtaacaccaaaagacggttacagatttgaaaaatggcagcaggatgatctgacattcttcaatagtgatgatgagctgagaaattctgaatacctggaagatcaaacattcattgcacactttattgtaagaagagatcttcattatgagatccattacttctatgaagatgccaatggcgttgtaacagaagatacagcagcagcgattgtaagtgatatcggtgtattcggagaaaagatccttacgactacagtgccaaaagaatctgaatttaacggaaagcattacgttctggaacgcattgaaggagcggataagcaggttggctttaatcctgacgaaaatattgtaaatgtatactacagtatggatgagatcggtgaacctgatccggatgagccagacaatatcccggataaataccagatcacattcacctatgtatcagcagatgctaataagggaactgtgacaggaacaaccaaagaagtggttactacttatgaaatcaccagagatagcgtgactggtgagatcacagcaacaaatggcccgacagcacagcatccgacccagccatctactgtaacaccaaaagacggttacagatttgaaaaatggcagcaggatgatctgacattcttcaatagtgatgatgagctgagaaattctgaatacctggaagatcaaacattcattgcacactttactgtaagaagagatcttcattatgagatccattacttctatgaagatgccaatggcgttgtaacagaagatacagcagcagcgattgtaagtgatatcggtgtattcggagaaaagatccttaagactacagtggcaaaggaatctgaatttaacggaaagcattacgttctggaacgcattataggagcggagaagagaattggtcttgatcctaaggaaaatattgtaaatgtatattacagtattgatgtaataggtaaagaagacccggataagccagacaatatcccggataaataccagattacatttacttatgtatcagcagatgaagataagggaacagtaacaggaataaccagagaggttgctactgtttatgaaatcttcactgacagtgaaactggtgagatcacagatgttggccggccgataccgcagcatccaacccagccatctactgtaacaccaaaagacggctacagatttgaaaaatggcagcaggatgatctgacattcttcaatagtgatgatgagctgagaaattctgaatacctggaagatcaaacattcattgcacactttactgtaagaagagatcttcattatgagatccattacttctatgaagatgccaatggcgttgtaacagaagatacagcagcagcgattgtaagtgatatcggtgtattcggagaaaagatccttacgactacagtgccaaaagaatctgaatttaacggaaagaattacgttctggaacgcattgaaggcgcagataagcagatcggtcttgatcctaaggaaaatatggtaaatgtatattacagtatggacgagatcggagaaattgatccagatgagccagacaacattccagataagtatcaggttactttccagtatatttctgaagatccatcttatggaacagtaagcggtaaggtaaaagaagttgttaccagacctaagaatgcagatggtacctacaacatgactgcaccggttcatccgaaggcagaagtaacagttgcaggaatcggaaattataagtttaaccgctggtctgatggaaatacgaactatagcgcagcaagtgagatcgcaaaagccggatttatcgcagataccacatttaccgcatatttcagctacagtggcggaaatagtggcggcggttcatcaggtggaggcggtggcggaagccacagatcaactatctctaatacaagcggaggtcctggtgttactacaacgatcaccccgggagacgtaccaatggcagaattaccagagtcaccggcaccaatcgtcattgatgatggtgagatcccaatggcagcacttccaaagactggccagaccactgtaaaagcagcactgaccatgatgttctcaggaatcttccttgcattaactgcaatcggaaggaaaaagaaagaacaggatgtatagaaagaatatctgaaataaagaaaatattcccaaactcataaacataccctgttagcggaaagctccggtcggaaacggccggggctttctgcgtatataacatactaagaaaaagcgggaacacaaagggaaataggcctggaggataaaatgggaggggcataaatgtattgcaatccactgtgtcatgtgctaaaatgaacatgagcaaggtatctggaataattctaaaatattattaattcaaatctaagctggtttcaccagtatctgaaagactctttgcttaaacccaaattaatttaagcagggagaacagtaaaaggcagtatcttcctgcgacattacacgaaggaaggacaaatacccttatgttctccggtatcttccttgcactggcagctatgagcaagaagcataaagaagaggaatcctaagtaacaaggatcatgagagtttcaagcaacaaaataagtcttaagtgactgataagagccgcacactggcaaaaaaaagcagtgtgcggcttttttttgatttgctttttttgcgtttttactattgactgcgggtttatttcttagtattataattattagaaaagataaatatacaaaacatatatattagtaaatctaatatatattattcaaaaggagaatgaaagatggctaaggtaggaattgtaatgggcagcgactcagatatgccggttatggcgaaagcggcagagatcctggacaagtttggaatcgattatgagatgacaattatttccgcccacagagaaccggatctgttttttaagtgggcaaaggctgcagaggaaaaaggttttaaagtgatcattgcaggtgctggaaaagcagctcaccttccaggaatgtgtgcagctatctttccactccctgtaatcggtatcccgatgaagacttctgatctgggcggtgtagactctctgtattccatcgtacagatgccaagcggtatcccggttgcaaccgttgcaattaacggcggtgccaatgcaggtatccttgcagcaaagatccttgcaacatctgatgaggaactgttaggaaagttaaaagcatattctgagaatttaaaagaagacgtagagaaaaaggctgagaagctggaaaagatcggatataaggaatatctggcacagcagaaataatacggaggataagaagatgatggattacaagaaagccggagttgatattgaggcaggttataaatcagttgaattaatgaaagagcatgtaaaaaagaccatgcgcgcagaagtattaggcggacttggcggtttctccggcgccttttctttagcaaagatcaaggaaatggaagagccggtattattatccggtacagacggctgcggaaccaaggtaaaactggctattatcatggacaagcatgataccattggtattgacgcagtggctatgtgtgtcaatgatattgcctgcgcaggcggcgagccattattcttcctggactatattgcctgcggaaagaattatccggaaaagatcgctgatatcgttaagggcgtggcagaaggctgtttacagtctgaggcagctctcatcggcggtgagacagcagagcatccgggactgatgccggaagaggattatgacctggctggttttgcagtaggtgtctgcgacaagaaagaaatgatcacaggtgagaaactggaagcaggagatgtgctgatcggtatggcttctaccggcgtacattccaatggcttctctctggtacgtaaggtatttgagaaggaaatgaataaagaaggtttaaatacctattatgacagccttggaaagaccttaggcgaagcacttcttgcgccaaccagaatttacgtaaaggcattaaagaacattaaaaagtccggcgtgaccgtaaaggcatgcagccatattacaggcggtggtttctatgagaatgttccgcgtatgttaaaggacggtgtccgtgctgtgatccgcaaggacagctatccggtacctccgattttcaaacttcttgctgaaaaaggcaagatcgaagagaaaatgatgtataatacatttaacatgggacttggcatggtagtggctgtggacgaggcagatgtggataagaccatggcagctattaaggcagcaggcgatcagccatatgtagtaggaaccattgaaaatggggagaaaggcgtgactttatgttaagagttggcgtaatggtatccggcggcggaaccaatcttcaggcgatcttagatgccattgacagtggaaagatcacaaatgcaaaggtggaagtagtcatcagcaacaatccaggggcttatgcactggaacgtgccagaaaccatggcatcgaagctgtttgcatttcaccgaaaagctttgaaaacagaactgcgtttaatgaagcatttttaaagaaaacagatgaatataacctggatctgatcgttctggcaggatttttagtaaccatcccggaggagatgatccgcaaatacagaaataagatcatcaacatccatccgtccctgatcccgtccttctgcggcgtaggctattatggcttaaaggtccatgaggcagctctggcaagaggtgtaaaggttacaggcgctacggtccactatgtggatgaaggagtagactccggtccgatcctgcttcagaaggcagtggaggtgcagcctggtgatactcctcaggtactgcagagacgtgtcatggaacaggctgagtggatcattcttccagaggcggtaaacaagatcgccaatggcttgatttaggaggaaagatatgaaagtactggttatcggaggcggcggcagagagcatgcgatctgctggaagttatctaaaagcccgaaagtagatgaattatactgtgcaccgggaaatgcaggtattgcagaggttgcaaaatgcgtggatatcggtgtaatggattttgaaaaaatggctgatttcgcaaagaaagaagcctttgacctgatagtagtgggaccggatgatccactggcaggtggtatcgtagatgtactggaagaaaagggactgcgtgtgttcggaccaagaaagaatgcagccatcttagagggatccaaggcattttccaaggatctgatgaagaaatacggcattccgacagcagcttatgagacctttgatacaccggaagctgcccttaaatatctggaaacagcaccggtaccgatcgttttaaaggctgacggtctggctttaggaaaaggcgttctcatttgtaatacaagggaagaggcaaaagaaggcgttaagactctcatgttagataagcagtttggacacgctggtgaccgcattgtagtagagcagtttatgactggccgtgaggtttctgtattgtcctttgtagatggaaagaccattaagatcatgacttccgcccaggaccacaagcgtgcaaaggacggggatcagggcttaaatacaggcggtatgggaacattttcaccaagcccattctatactccagaggtagatgaattctgcaagaagcatatctaccaggcgacagtagatgccatgaaggcagaaggccgtgagtttaagggaattatcttctttggtttaatgctcacagcggatggaccaaaggttctggaatacaatgcccgctttggcgacccggagacacaggtagtgcttccgagaatgaaaaatgacattgtagatgtatttgaggcatgtgtagacggcactttagatcagatcgacctgcagtttgaggataatgcggctgtgtgcgtagtgctggcttctgatggctatccggagcattatgaaaagggtaagaagatcacaggtcttgagaactttaaggataaagatggctattatgtattccatgccggcagcaagtttgatgcagagggaaatattctgacaaacggtggccgtgtcctgggagtgacagctacaggaaaagacttaaaagaggccagagccaatgcttataaggcaacggaatgggtcaattttgagaacaaatacatgagacatgatattggtcatgctattgatgaggcgtgatttccaggggtgaatgtggaaatcaaatcgttttaatatactgcaaagtgtaggaacaccggctaaaaaatagccggtgtttttgtaaatatctgttttatgtgggtgcattacagttcagttaataaaaatgccatgtacaaaaaaatgaaggtatttaaaaggtatctggatgctggacttttccctgaaaactattataataaaatcatccattaattattggaaaagatattagatcttaaaggtggaggtacgataaatgaaggtggatgcaggaaaaatagttgagttagtaaggaaaatgaaaccgctgtttgcagacagcagccgcgtatcccaggtaaaagaaaaaggaacctgtgattatgtgactcaggtggatatccaggtgcagaagctggtaaaagagggcttgtattctatgtatccacaggtacagtttatgggagaagagcaggataacagtgctattgacaggagcggggatttctggatcctggatccggtagatggaactactaatctgatccatgatttccgtcacagtaccctttcgctggcttatgcagaggctggtgaggtggtgcttggaattgtgtatcagccttatacagatgaattgtttattgcccaaaaaggagaaggggcatttttaaacggtgatcccatccatgtaagcggggcagaaacattgtcagaaagccttgttactattggaacaagtccttattatcatgaactggcagactggaattttaaggtatttaaagaagtatttctgtcctgtcaggatatccgccgtttaggctccgcagctcttgacatggcatatgtagcctgtgggagagtggatgcgttctttgaggcaatcttgcagccatgggatttttcagcagcaaagcttctcatcgaggaagccgggggaaaagtaacggattttgcaggaaaggaactgcctgtgggaatgccgggggctgttctggctggtaatgggaagataaatgaagaattgctcaggatattaagtgagaagtgaagagggtaatagagaaggaagggcaggtgaacatatgaacttgaaaatcagtatcggaagtcaggatttcgcttttttgcgggagcataactgctttttggtggataaaactgattttattaagaaatggtgggagtcaggggatgcagttacgctgatcacccgtccgcgccggtttggaaaaacgttaaatatgagtatgttgaactgctttttttcccggcagtatgaacacagaggggatctgtttgaaggacttaatatctggtctgatctgaaataccggaatatccagggaagttatcctgttatttatttaagttttgcagatgtaaaacaggattgttatggagatacagtgcagaaaatccgacatattattggtgacacttaccgccagcaccgctatcttctggatgcattatgttttacagaagcagaaaaacatcagtttacaaaagtgatgaattgcgagatggatgatgtgacagctcaggatgctttgaaaaatttatcttactatttgcatcattactggaaaaagcgcagtatctttctgcttgacgagtatgatacgcctatgcaggaggcgtatgtgcatggatattggaatgaatttattaattttatccgcggcttatttaattctgctttaaaaacgaatccatatctggaacgtgctgttatgacgggaattacctgggtatctaaggaatctgtattttcagatctgaataatctgaaagtcataacgatcacttcagaagagtatgcggattgttttggttttacggaagaggaggtatttgcagctctggaacagactgggctggaggataaaaagacagatgtaaaagaatggtatgatggctttatctttggaagcctgcatgatatttacaatccatggtcaatcaccaattatctggataccagaaagctgcagccgttctgggcgtcaacaagttctaacagtctggtaagccgtctgatccagactgcttccggggagattaaggaaaagatggaagaacttttgcaaggacgacagatcgtggtcacatttgatgaacagatcgtatttgatcagcttggaaggaatgagaatgcaatctggagtctgcttttagccagtgggtatttaaaggcggaacaggtagaatatcgtggcctgatccgggaaccatggtatcatttgagtatcacaaatctggaaacggccagtatgttttcaggcatgtttaagggctggtttggcatgacacagaccagctataatcgatttgtaaaagcgttgttccagggcgatgtggatgctatgaattactatatgaatgatgtgtccgttgcaacattcagcttttttgatacaggaaaagaaggaggtaagcatagcgagccagaacgtttttatcatggttttgttctgggacttcttgcagaccaggcagaacagtatgaaatccggtccaaccgggaaagcgggtttggacgatatgatgtgatgatgatcccaaagaatcagaagaatacagatagtttggcttttattctggagtttaaagtgagaaacccgggaaaagaaaaatctttggaggaaactgtacagacggcattagagcaaatagaaacaaagcagtatgatgcggaattacttgcaagaggaatagaaaaagagcggatccggcattatggatttgcatttgatggaaagcaggtactgatcggatgatggtcagtatctgtttttgtatttttgggatgggttctgatatctgtacagagcatggttctttttgagagttaaggtagagatcgttatagttcaactgcaacttaagattttaaagaatttcaattatgtattgactattgtcatatgttgttatataatgtattcagatattataaaagaacaaaattcaggaggataccaattatgacaatcaaagagatcgttgcttccatcaaggcaaaacagccagaaatcaagaccgtatactttgtaggctgcggcgcttcacagtctgatctgttccctgcaaaatatttcctggagaacaacgctaagaagcttcgtacaagtatctatactgcaaataactttaattactctactccagctggtgtagatgataccgctatcgttatcacctgctccttaagcggaaatacacctgagactgtagcagctaccaagctggctgttgaaaagggtgctcatgtagtagctgtaactcataaggcagattcagctctggctcagaatggtcagtatcagatcatccatggcttctatgagagctatggtgcaaagatggaaaagcctgcaagagttctggaactggcttgcgagatcttaaatgagtatgaaggctatgagcactatgatgatatgcaggatggtttaagcaagatctttgatctgatcaatgattcctgcaagctgttccgttctactgctaagaagttcgctgaggatcattacaatgcacctatcctgtatgtaatgagttccggtgcaacccagtacaccgcttattccttctctatgttcttaatgatggaaatgcagtggctgccatccagcaccttccataccggcgaattcttccatggcccattcgagatggctgatgagaacgctcactacctgttaatgatgaacgatggtcctacccgtcatctggatgcaagagcactgaccttcttacagcgtatgaacgctaagtacactgtagttgatgctaaggacttcggtttaagctcccatatcaagagcacagttgttgaatacttcaacccactgatgatcggcggcgttaccagactgttaggtgaggaaatggctatcaagcgtgatcatcctctgacaatgagaagatatatgtggaagctggaatactaatttctggtgtactctctaaaagaatatgataaatgtgaaaatgcctcggaagcggtgcttccggggcatttttgtggggagaaagtgtgtattccccgccctctgggcggggaaagaaatgatgctgttttggtggattttgtgggaagaagcttactggaatgtccagaagccacagcaagacatttggggataatacatgattactttattagactgcatcccggaaccggtctgcggcgctcgtaggcagttacatggtcaaatccggcctggaccagaagctttgcggcttcttcaaagtcagcggctacatcggcgggcttatgggagtcagaacctacagtgacgatctcgcctccaagctctttatatcgttttaatgtacgaagtcccggcattggttcaccggcgccctggcggatgccggaggtgttgacttcgatgccttttccgcgggagatcacatttttaaggatctggtcaatatagctttcgtatttttcatattctaccgggaagcagcagcgtaccagatggcgtttgatcagatcgatatggcccagacagtcatattcgccgtaggcagacagttcaataaggtggcggtagtagctttctgtgatctggggaactgtgacgtctgtgtagtccatcttactgacatctacattttcaatcttatggacagagccgatgagataatcgaaaggatagttcctgatgatgttaaatgcctcttcacgggttaaatggagctgtccgaactccataccgcttttaatggtcaggcggcctgcaaaacgctctctgcagcgttctaagctgtcccagtacatcttcaggtattcttcgtggaaaaactttctgtggatgccatgggcataaaattcatagtgatctgtaagagctacttctgtaaggcctttgtctattgctgcctgacacatatcctccatagggactctggcgtcaggtgaaacgctgtgcatgtgataatcggctgtaagcatatgaattcctcctgatattatgtattttttagaattgcgcgagtgcgcatcgttggcacgaagtgcctttttgtgtactagggagttccaacggaatttcctagtacataaaaaagactgctcattacggcctgtggaccgaaagagcagtctttttgatatcataatgaaaattgaagagatcagccttttactgctccggatgtaagtccgcgtacaaactgtttggacatgcaaaggaacaggagtaccattggtaaagaggcgatcaggataccggctaacattacaacgtagtcggattttaagtcaccctggaaggtcatcaggcctaacgggatggtcattaattttttattctcaaggaatacgtttgcaaataagaattcattccatacattgtttaagtttacaatggcacaggaagccataaccggcttactgataggaaggatgatctgtgtgaagcgctggaagctgttgcatccgtctacgattgctgcttcctctaattcctttggaatggagatgaagtaagctctcattaaaaacatggtaaatgggatacggaatgctatgtacggaaggatcagcgctgcacgggtattgtaaagctttaatgcctgtaagatcttgtacagaggtactaaagcaacctgttcggaaagggccataccgcctaaaataaggaagaatacgaaaccgcttccgggaagggaaaaacgggtcagtccatatgccagcatggagcttaaaagcaggatgcatagaatggaaatggcactgacgataatggagttcttaaagtagaagagaagtcctttgccccatgcagttgcgtagttgacaaacatccattttttgggaagagccagggagtttaagaacatttcctggtttgtctttaaggagtttaacaccagccagcacacaggaagcaggatgatagctaccattaacagaagaaatacatggagcagtacggaacagatccgggtttttaatacatatttgtctttcataccaaaacctccttatatctctccggaacggctcaccttcagctggaagatagaggcggttacggtaatgacaaaaataagaacaccagttgcagcagccatacccatatcatcatgtaagaatgcgttctgatacaggaataagccaagtacctgggaagcatttccaggaccacctactgtggtggagtaaacctcggtaaacagcttgaatgcaccaattacagtgataatggagcagacgatcagctgttcctttgcaagaggaaggataatgcttactgcgcggcggatggggcctgcgccgtcaataacagcagcttcgatgtagtctctggacacgttctggaaagcaactaccattaacagggtaatgtagccggtgaactgccactggctcattgcaatgatacagaagatagccaggtttttatcacctaaccaggtctgttgcatgcttgcaagtccgacgtgctttaaaaatgtgtttaaaagaccaagctgcggattgtagataaagttaaacatcataccaacggcagtcagggaaaccagtgccggaaggaaatagatgtttctgcaaattgatttaaagcggtcactggcaagtctgctctctaacaggaaagccaggaatgttccaaatccaacctgcacgatcagggagatcacgcagtaatacacattgttccggatcatgatagggaatgtatcatttgtaaataatctgcggaaattgtcaagacctacaaacttcatggaagaagagtaggaagaaagacggaaaaagctgtatacaaggttaacgataatagggatataaacaaagccaaggaccattaaaaggccggggatcacatataaatacggtgtgagttttgttttctttttcatcctgacaccatccttttctttaaagatagggagcagatgctgctccctatcgtggatttcttataaaactttaacgagaactattcaaccagtttctgagcttcagcagctaccttctggatcttagccattgcgtcagttggggttacgtcaccatttgtgatgtcggaaatctgggtcagatactcgtcgcaaactgtggagtacagagcgttatcaaaccagatgtccatcttcttagcgttggagattacatcgtaagcactctttaaggactcatcggttaaagtcttgtccaggccaagggaagcgttaaaccagccaacctgctctgcctgctgtgcaccaacttcagcaccaaggaaccattttaagaactctacgcactcatctgggtacttggtcttagaggagatcgcaaatccttcaggagcgccggataccagatttggattacccttagcaccttcgatggttgggaacttgaacattccccagttcagatctgggttttcctgcttaacgttggtgatctcaactaactctgcaaagaggatagcgttctgtccctgggtaaagcctaaacgggccatatcatgggtcataccatttacacctgtgttcatgtaggatactaactgctggtatttttcaagagcttctgcatatcctggatcggtaaattcaccggtcttaggattgtagtcttttgctctggtctcatcatctactaactgctcatttaatgcgccgatgtagtgagcggatggccacttgtcctggtttccttctgcgataggatccatgccggatgctttgatcttgtcaagaacctcgatgaactgatcccatgtctcaggaacttccagtcctaactcattgaagatatctttgttgtagaaaaattcttttgcatccagacggaatgggataccataaaccatgccatcttcagttgtgtattcattcatctgtgtttccatcagagaagctttccagtcaggatctgcttccatgtatggagttaagtctaataacaggccttcacggataaatctctcagagaactcaccgcagaaactgaagaagatatctgggcactcatcggaaccaactacgactttgatcttctctttgtatggctggttctgtgcgctggtcacttcaaacttgatatctggatgaagggattcgtactcagcaagtttgctttcaatgaagctgttgcatggatcatcagggaaacggtggaacagtttgatgacttttacatcaccgctgtttccggaatcagcagctgcttctgttttggtttctccactgcctgctgcagctgtggtgctgtcagaagaggaactgccgcctccgcatgcggtaaggcccagtgccattactgctgcaagtccaaggcttacggtctttttcagttgttttttcataatgatctcctttcggtcctcagttttcgctgtctctgttgtattgatacaacacataacatcttagtacaaaatataccacattgttatatgacttgcaactgtttttttaatgtttttgtaacttttgttgataaagttttaactaaccagcacttttttgagaaaaaatgacggcgtttctttagaaaataaagttatttcataaaaaacgccgttgtttttaaaattcctctttatagttgtattgtcgcctctgaagaatattaggtacagtaatttatactatgaacctacgtaacaatcgtaagacggtatctttgggggttggtaagcagcttgctgtaatgcagcacctcatcatcctggtcaaagacctcatccttttgcagcaggagagcatgtttttccggaactcccagacgctgggcttcttccggtgtagcatagcagatctctactgttttaacagaatgggttgggatcagtccgtggttatggaaaaattcataggtagagcctaacaggttttcctttaaaagaaattccatacgcttgggataataactgtcttcgatcatgaccggaatatcatc

SEQ ID NO: 3623 - DNA, 52306 bp, Unknown
  gut microbiota DNA sequence
ttcgtctactttcagacgtttggcaatggagccgtccggtatcatccattcaacggtgatcagttccgcagatggcacatgcccgtccattttactcatttccgtaaagcttatgatctggttgtctacaacacggtgcagtttcttttctgccacaaaggttccaatgccctgcttgcgtactacgaaaccgtcatctgccagcagttcaatggccttgcgcacagtaatgcggcttacttcaaaatgctggctgaattctgcctctgtcatcagcttgtccccggcttttaatttgccgtctgtgatctgctgtttgatcttttcggacagctgctggtaaagaggcaccatagaattttttatcatgaatatttatttcactcctaatacattacatttatactgttttgcttaaatacggcacggctataaaagcgggtgcgtgaaaaattccaaaactgggagaatgttaatcgataatagcagttccgtagccgaaagccccttctaagctgcagacctttgctgcaaactttgccccacagtccatggcatgcttcagctgggcgatcatatggtcatggtcaccggcaaaaagagccccattttcctgaagcagggtagtaagcagagtggagaaataggagtctccggcgcccatggtatctaatacggtttctgctttataagcaggtgcatagacgatctcaccgtcataaagtgcataggagccgtcttcgcctacagtaccgactactaaggttactccgtaggaagccgcttttttcatttcacgttctctttcctctgcagttaaatgtgcgcaggaaagaagggctactttgatatgaggacacacctgttcaagcagggcatcgtcccatacagtagaaaaatcaaaggcaataggtacacctgtttcttctaataaagacaggtcatcatagatgtagctgtttgtattggagtagatcacctggaaggacttgatatagtccagatcttcttttgtaaagtcaaatggatgttctttggcaacaccgccgcggttggagcctaagaatacacgatccccgtcctttaaggtaacgcgggctgcaccgttttcaccgtggaaatgtctggaatggctgaagtctacgcctaactgggttaagattttgcagttgtattcagcaacgccgtcatcaccaaatttaccaagatatgctggctttccgccgttcataatggaatagacacatgtgtttacacactgtcctcctggatacatttttcctctggataagtatttatccactacattatcaccaatggcaatgatttttgcttcactcatattaaaaacctccggttttttgctcatatttcctgacggatgtccgtaggacaacaacaatctgttagatacaatatataacaatatataacatcttgtcaatgagtttgtatattaccggaggtttttcttgcaagcttacgtcggatttacgattttttgaccctggtatcattacatataaggttcaaacattttgaagtttcggcagtcagcctcaaatggcttctgataatagtcggaagcagtgatctcctggcttaaaagtccggtgtagccgtttttatttacagtttcaagccagtttttcaggttgtgatttccgtcaccccagatcagatgtccgtagggagttccgtctatgaagtgcatgtgtacaatgttctcggctcctaaggtatcaaaccactgctgtaaagtctcgcctgccacgcccattggacaggtgtcgatcatggctttaaaattaggatggtttatttccgtaagcatccgctttacatcatcaacagtggttgccagattggtctcatccgggcgaagggattccatagcaagggtaatgccctttgtgccggcataatcagccagccgtgccaacatgtcgcggccccgtttccagccttcttcccggtcttcgtttaaatatccccgtccggagtgtacagccatgaccttacagccaagttcttcaccggcatccaggccttttttgaaatattcaaaacttttggcatacagatccgggtctccggctgcaaactgataggggacagaacagttttccggggtgatgacctggatggtaagaccacgttctcttgccattttgcttacttttttacagtcatcatattccagattgcttaagaaaaaatgaggagaaccagcccataattcgatggtcttaaaaccggcccgcatctgggattccagaaaatattccagagaatagaatttataatggatgttcatgccggatacctggtcaggtcgtattagtttcattttgtatacactcctttaactgtaaattttttaaattgagtataacacaggaaagccggggcgtacagataggaaaaaattaaggtatgtttctttttgtaacatgccatatgccgtatatgatcagaaccgaaccaataaaggaggacagaccaaagggttctttaagaaacagtactcctgcaaacatggaccacatggtctgcaggttggagaaagcagcaagcctgccgacggacatttttccagctgcataatttaccaggatattgcaggtaacagagcagaagatactaaggatcagtaccgggatgataaagccggggatggtggcgtagtgaagcagtttcatggcattaccgcccagttggtggactgcattggtggtgaaaaagagacaggagctgcaaatagtgaaataagtgcgttcaaatgcagaaaaatttacagctgctttcctgttgatcacacgctgggttgcagataaaaagcaggcagaaagaacaaaaaggatgcccaccggctggattgcgcctgaggagctgccggccaatatgatgatgactacaccggctaccgggagaaagctgaaaaggatctggcgcagagttggaaattcttttaagaagagagcagaaagtcccattgccaggatcgggatcagggataatactacacctgtgaacatgctgttggtaagggcgatgccatagctttcgcagtaaaaataggctacatcattcaatgccagaaggagtacaggaaggatgtttttgccttttagcgagatgcgttctattttaaaaagaaggattaaattcattagtaaaaatgcgatgataaagcgcatagacagcagaatactggtgggggcatagtttaaagctgtcttggacagaagaagactgaagccccagagagtgttgccggtaatggcagcaatatcagggatgttttctttcagacgggatgttggaatggaaatagtatcagcgggtgtaaacatggaaacctccaaaagtttttgatgtcctatcagggtcttacatttggttaacgtatttttaatacaagctgagtgtatcattgcaggtatatcttgtaaaatacagaaaaatcatatattatattgaatggattgaatatatttgactggtacagttactttgaaaacgatgtactagtacaccgtttcgaaaatgatgtactggtattggatgaaacatcaggtctgttttattgatagaaaatcgttaaaagagaaatggggaaagaaaggatatggatcaggagatactggcatttttagagatctgccggtgtaagagcatttcaaaagcagcggaaaaattattcatcagtcagtcatccttaagcaccaaaatccgtattttggagcggaaattaggttattctctttttataaggggaaagggaagccgcagtgtaatgctcacagataagggagaaaaatttctgggactggcagtgaaatatcaggagatactggaaaaaatgttggctttaggtcgggatggaggaagcgagaagcttcggatatcttcgatgaacagtttaggaactcatctgctgacacctgtgtatgagaggttcatggcggaaaatccggatattatactggagataaaggatgcggatcaggctcatctgggagtggaagaagggataacagaccttgcttttacagtggtaaaagttgagtctgctactgtgcaggtgcgtcctgtttttgcggagcctatggtatttttgtgtgcagaggatagccggtatatgaacagctggaatgagagaaacgcagagaaagtggaaaaggatcagttggatctggaccatgaagtatatgtggattggtcgtatgaatttgtccactggcataatcagttgtttcaggggcggcagccgaagctggcattatctattatgaaccagcttcagttttttctgcgtaaaagggatagctgggcttttgttccggccagtgtggctgtggggcttctggcagaaggcgggataaagaagttgccggtggattttaaagtgccgccaagggtggtcaattatatgtgcatggaaaaggcagcgggaagcagaaaaatccagcgttttttacagtgcctgcgccaggtgcttttagaaatggaacaggtggagtttgagatttacatatagaagaatatattaaagaatatattaaagatattcgtgatccgcttatttttctttgaaaattggtgtggtggatataaaacaggaggatgtaaagcgcatgataaacagagaagacatgctggagctgaccaggcgtatgacaccggccagagcttccgtaggccggatcgcaggggcctattttgatgaagaaggctatgtggatggcacatttaatacgaattttctgaagctgtcagccagtgagcgcacaagaaatttaaatatggcgaaaacggtgctgatctctaagacaaatgagcagttgaaggaatacagaattacaaaagagatgggaaagccgggaagtgtatggcagctgcttgatggcgtaaaagagtcggaaatgaaaaatgatgcctatatggacctgttctatgaagtactgggagagaaatatcatccgggatacccgttttcctgttttatgtactacggtcagtatgatgtgccggtaaagggaacggataaggagtggatggaaggctctgaggaggtttattcatatctgttgtgcgttatcagtccgttgacaggtgaatatgagcctggggcaccggagtttggatttttgtatccggcttttaaggaccggagtacaggctgggagtttgtaaatgtgtatgagaagctgccggaacgggcgcaccgggaatggatggaatggttatttcggtaagagttgatgctggataataagagatgaattttatgttaaaaggagaagagtaaaatgactacggttacaacaaagaaaaaactggctgttttaggaaatggttttctggcggggatcattgtagaggcttataataagggacttttagaggaatatgagctgaccggtatattgggacggacaaaggaaaagacagaagcactggcagaaaaaggcggctgccgtccatgcagcactttagaagaactgctggaagacaagccggattatgtggcagaggcagcttctgttaaggctgtccaggattatggtatgaaaatattgtccggcggggcagatatgattttgttatctattggtgcgctggcagatgaaacattttacagaaagatcagtgaatgtgcaaaagaaaatggaagaaagatccacattgcttccggtgccatcggcggttttgatgtactgcggactatttctcttatgggacaggcacagacttctttccgtaccaaaaaaggaccgaaatccctttcaggaataccgttgtttgaagaaagccttatgacggacagagaagaaaagcaggtatttcatggaagcgcaaaggaagctatttctattttgcctacaaaggtaaatgtagctattgcggcttctttggcatcttctggtccggaaaatgtggatatgagtattttcagtgtcccggaaatggtaggagatgaccacaagatcacagcccagataccgggagtaaaggcagagctggatatttattccagtaccagtgccattgcaggatggagcgttgtggcagtgctgagaaatctggtttcaccgatcgtattttagcgaaataatacacagcaaaataatttgttcagaataatgttatcaaaaagggcagccgatgtagatcagctgcccttaaaaaaacttattttaaaccattttgattagaacttaccagcctttgcagcttcctcgatggaaacagcaactgcaacagtagcacctaccatagggttgttacccataccgatcagacccatcatttctacgtgagcaggaacggaagaggaaccagcgaactgtgcgtcagagtgcatacgtcccatggtatcggtcataccgtaggaagcaggacctgcagccatgttgtctgggtgaagagtacgtcctgtaccgccgccggaagctacggagaagtacttcttgcctttttcgatgcattccttcttgtaggtaccagctacaggatgctggaatctggttgggttggtggagttaccggtgatggaaacgtcaacgccttccttccacatgatagcaacgccttctgttacgtcgttagcgccgtagcagttaacctttgctcttaagccgtcagagtaggactttctccacagttcttttacttcgcctgtgtagtaatccatctcagtttcaacatatgtaaatccgttgatacgggagatgatctgagcagcgtcttttcctaaaccgtttaagataacgcgcagaggtttctgacgaactttgttagccttctcagcgataccgatcgcaccttcagcagctgcgaaagactcatgtcctgctaagaagcagaagcagtcagtatcttcttccagaagcatcttgcccagattaccatgtcctaaaccaaccttacgctggtcagcaacagaacctggaatacagaatgcctgaagaccttcgccgattgctgcagcagcgtcagcagctctcttgcagcccttcttgatagcgatagcagcacctacagtgtaagcccagcaagcgttctcgaagcaaataggctggatcttcttaacctgagcataaacgtccaggcctgcatcttttgtgatcttctcagcttcttcgatagaagcaatgccatagctgtttaatacagaattgatcttatcaattcttctctcatatgattcaaataatgccatcttcttaatcctcctaattggtcctcatcattctttacgtgggtcaacgatcttaacagcgtcagcaacacggccgtactgtcctttagccttttcccatgcagtagtaggatcatcacccttcttgatgaaatcggtcatcttgccaaggtttacgaactggtatccgatgatctgatcatcagcgtctaatgcaataccggttacatagccttctgccatttccagataacgtggacctttcttaagagttccgtacatagtaccaacctgagaacgcagtccctttccaaggtcttccagaccagcacctacaggaagtccgtcttcagagaatgcactctgagttcttccgtaaacgatctgtaagaacagctctctcatagcggtattgatcgcatcacatacaaggtcagtatttaatgcttccagaacagttaaacctggaaggatctcagctgccatagctgcggagtgagtcatacctgaacatccgatggtctctaccagagcctcctggatgataccttcttttacgttcagggtcagcttacaggcaccctgctgtggagcacaccagcctacaccgtgtgtcagaccggaaatgtctttgatctcctttgattttacccattttgcttcttctgggattggagcagcgccatgatgaacgccctgtgcaactttgcacatttcttctacttcctgtgaataaatcatgtgttaaaactcctttcaaagatacttgtatgattggttgtgtctgtaggaacagacatgtccgtttgtttaaaccggatgcctttgttaaaattatcacggcacacctatgttcattttctcacataatatgacattttacaagcaaaattttctcatgtgagaaacaagtttttcatgtaaatgtactaaaaaaaatacaggataacaggaaaatgggtataaaaaagactgctataaagtgaaaaattcattttacagcagttctttatctccagccggagcgtgttcccgggataatcagtgtgagaccggacacctccgatacgggcgaaaccgcactcctcccagaactggcgacttccttattataaaactctaaataaaaaaatacaagggtggaataacctgggaaagggaacgtaagagaagtagaagtagtggaaataagatcgtggaaaatgaagaaatgtgtaaaaatgtctgtaaaaaggggggatggcccggagtactctgcgtagcaggtacttccgggcccgcgtcatctctgactggtttaaaatataccatgacccggtttaaaatgcaatggaagtcatagaaacgtaatgaattgtaatatttcttacaaaaaacgatagaaagagttataaaagatagatgaaaaatatttgaaaaatctgaggttttgttatatactacatattacgatagcggcagtatgtctttagcgatgtatccgctaaatatacaaataaggatggttttactatggcattattagaaacatggagaaatctggcatatggtgacggcctggatgataaaaaaagagaagagctgtggtccggatatttccagatcgagaagggaatttatgagcagatcctttcccagcctgagcaggtaatcacaggtactgtaaaggaactggctgagaagtataacactgagatcctgatcatgaccggatttttagatggtatcaatgaaagcttaaagggatatgagaacccaatcgatactatggaagaagataccgaagttaagatcgagatcgatcctgagaagctgtactacaacatggtagaagctaaggctacctggctgtatgaacttccacagtgggatgcgatcctgactccagaaaagcgtaaagaactgtacaagagccagaaggcttccggtactgttcgcaaggcaaagaagatcttcccaaatgatccgtgtccatgtggaagcggcaagaagtacaaaaaatgctgcggtaagaacgcttaagcaatctgaaatgtgcgcctgtccggactcttccgggcaggtattttaatgttacagtccagatcctgctggttcggagaaaatgtaatattttaatgggagaagaaaatggaagcatatacaagctttgcgcaggtctatgatctgtttcaggataatattccttatggagaatgggcagattatttaaaaagcctgttaaatgaatatggagtaaaagacggactggttctggatctgggctgcggcactggaagcatcactgagcttttagcaaaggccggatatgacatgatcggcgtggacaattccgaggacatgctggagatcgccatggataagcggagcagatcgggactggatatcctgtatcttttacaggatatgcgggaatttgagctttacggtacagtaaaagcggcagtgagtatctgcgattccatgaactatatcctggaaaaagaggacctggtacaggtatttaaactggtaaataattatctggatccgtcaggtatctttatttttgacatgaatacagaatataagtacacccatcttttagcagatggtacttttgcggaaaacagagaagaaagcagctttatctgggagaatttctatgatgaagaggagcggatcaatgaatatgacctgactttatttattaaagaaggggagctgttccgcaagtttgaggagactcattatcagagatgctattctttggatgaggtgaaagaggcagcaaaagaggcgggaatggattttgtggccgcctatgatgcgtttaccagggaatctgtaaaggatgacagtgaaagaatttatcttgttttccgcgagcgtgggaaataagaaggaccattaacgagcagtcagcctgcgtaagcagacagtaaactgcgatagcacgggactgcgggtataaaaataacaaggagagaacaatatggcagattatgtgatcagagccactgcggcagaaggtcagatccgtgcctttgcggcaactaccagagatctgactgagactgcaagacaggctcacaatacaagtccggtagcaacagcagcgctgggaagattaatgacagcagctgtgatgatgggctatgacatgaagggagcagatgaccttcttaccataaagatccagggcgatggccctattggtggtctggttgttaccgctgactctcatggagaagtaaaaggttatgcttttaatccgggggtcatgcttccgccaaatgataaaggcaaactggatgtaggcggtgccttaggcgtaggcgttttaagcgtgatcaaggatatcggcttaaaagagccttatgtgggacagaccattctggtatcaggagagatcgcagaggatttaacatattattatgcaacctctgaacagaccccttcttctgtggcactgggcgttctgatgaataaggataatacggtccgtcaggcaggcggatttatcatccagctgatgccaggtgcttctgatgcagttatctctgctctggaagagaaaatcaaagagatccactctattactacattattagatgtgggaaatacaccggagacaatcttacagtacattttaggagacttaggactggaaatcaatgaaaagcttcctgctaagtttacctgcaattgcaataagagccggatcgagaaggcgctgatcagcgttggaaagaaagacatccaggaaatgatcgatgacggtaagccgatcgaggtaaactgccatttctgcaacaaaaattatacctttgatgtagaggaattaaaagagatcctggaaaaggcaagaagataaaatacacacaaaaggagccagtcatgcgactggctcctttgtaatcatttgaaattcacgtataacttacttcaactatctatcaatttgatatatgtttgaaaaaggtacactgttgttcattgattataatttggttacgttagtagcctgaggtcccttagcaccatttactacgtcgaactcaacttctgcgccttcgtctaaagacttgaagccttccatgttcagacctgagtagtgtacgaatacatcgttgccctgctcgtcagaaatgaatccgtaacccttctggttgttgaaccacttaactgtacctttcattacgatacctccaaaaaatataaaaaaatgttgagttgcaagtaatttcgcaactgtgattagaatatcacaaattaagggcggtgtcaaaccttttgtgcctaagaaaataagtattgagaggaagaaaaagttctggtacaataggcaaagaaaaaaatttaacaatgtttaattgagagtttttttgagttagagaggatttagaaatgtctgaaaatgaaatgaaaatgccgaaaataaagctggtcaatattgtaaaacatttctgtaccattaccagacaccgtctgttagtgtgtaagcactgctttaagatcggattatactggcagggactgacacatgacctgtcaaagtacagtccggaagagttctggacaggagtccgttattaccagggggaccggagccctaatgcggcagagcgtgaggcgattggtttttccaaagcctggcttcaccataagggacggaacaagcaccattttgaatactggatcgatgtttctttaaataaagaagaaggtctggtgggaaataagatgccggtgaactatgtggcagagatgctttgcgaccggattgcggcctgcgaggtatacagagggaaaaattacaccagcgcagcacctatggaatactacgaatttacaaagaaatacattaccattcacccggagaccagggcgcttttggaaaagctccttacgattttaaaggatggaggggaagagagcgcttatgcttatatccgtaagctgttaaaaaagggaagctattaaaacaggcttccctttttcgtgcttattttgttgtgttttaagctgttttggactgcttactcttccggaaacaggttctcttcgataatggcaaccgcatcacggatgcagtccggacatgcgcggaggacttttccggtgtctacgccctttaattcacggcatacgatggtggagtttttctccttgaaagctgcgatgcaggctttggatgccttataggaagttcccttggagtttggcttttccaggtctgcagtgctgatctttaaaccggctaaaacggctgctgcggagatagcgccacaggttccttccataccgcccattccaaggccaaggccctcagttactttaaacagagtctccgggtcaatatctaccttatctaaaaatgcgaaagctacagactgtgcgcagttgtaacctttgttgtgacaggcaatggctctgtcggctcttgactcttttgtgatctctgacataatcatattctccttttaaaattaagatttggaaatttttgtaaaataatgttgtcctatttccaggcagcttatatgaatgataaaaccgccaagaagaacactgacaaggtaaagacagtttcctgcaaatgttccgatcaccagggagatctggtgaaagacgatctgcccgtttggataatagggactgatgtaaaacatatccgcattgccgtaaggatgggataatacatttacagctgtggcaatggcagtacagaaaagaaacaacgggatcgtatgcagatagctttttggcgtttctgttttcaggttataaaatgcacagataagccccataaaaataaggttgaaatgccataaaaagccgtggacggtcatggtccagtaaggatgcatcagtccgctgggttcagccagtgccatgatcccgccaagaagaccgaaatcctggataaaaaggtaaaagacatttcttattcgggcaggaaccatgggaatgaaaagtccaaggtacatgggaacactgcacagctggaatggaaaataccaccagtcataggttctgccattttctatataatagataaatccctgtttatataattctgtcagccctaaaaataagccgcataaaaaaagaatggtatccggtccggcttttctttccggaaaagagaacttccgggcaagaaaaatgcttaaggatacaccaaggacggtcaggaccagatgaaaagctccatagggcttaggagtatccatggtccaggcggttgcctgaaaaaaagcttcagccatataaaaaccaccttctggaattgtatatctcgttaaagattatacaacattcaggtgagattgtccatgaagggagaataaaaagagggaagcctgcgcagtctaagaaagagaaaaaagattggatacagtatgggaaaattccaggagggcaaaaaatggcagggatagtaacagcgcttttatccggtgcattgatgagcgtacagggcgtatttaatacaggtgtgacaaaacagaccagcgtgtgggtggcttccggctgggtccaggcaacagccttgattgcctgtgttgttatatggttttttactgggagaccgccggtgcggggactcttttcggtttctcccatctaccttctttccggcggtatcataggggcggtgatcacctatacagtgatccgcagcatgcagtctttaggaccggcacagactgcccttctcatcgtagtggcacagatcatcacagcatatgtgatccagctgtttggatggtttggcacagaaaaaatgccttttgaatggcataaacttttaggagcagctgttgctgtggcagggatcattatttttcagagataaagcgaaaagtcaaaaaaagacgggaaaatgttagaattaccgcttgtatttaaattgcctttccgatagaatagtaatagcaggctgagatggtattccatggaggaatatcgttgaagagaacattatctttgaagaagaaaaagcagatagctgcggccctggctgcagctgtgtttgtctgtggcggttgcacaggaaatctgaaagaagaacaggatgagatcctgcttgaaaccgtggctgaaagcagtgaaaacctggaacatgcagatgatgcagaacagtcagaagcaggagaaacattaccggaaacagctgaaccccaggaaacagcagaaacaagattgggatctacaatctacgttcatgtatgcggtcacgtaaaatatccaggcgtttaccagatgcaggaaggcagcagagtctatgaagccattgataaggcaggtggaatgttggaagaaggtgccggtgatgccatgaatatggcggctgtgctggaagatggtatgaggatcatggtaccggatctggcccaggcagcccagatgatagaacagggcgctgtttttgatcctggttcatctgcaagtgtttctgaccggaaaagttccggaaaggtgaatttaaacagggccgatgtgaaagaactgatgacattaactgggatcggccagtcacgggcagaggcgatcatacgttacagggaagaaattggcagctttgagagaatcgaagatgtgatgaaagtgtccgggattaaggaaagcgcttttaataagatcaaagatgatattactgtatagttgatagagcggttgctggcttgcggtgcatggacagtgacgataaagagatagatatagataaaggggagctgaaaaatggcacgggtattagtagtagatgatgaaaaactgatcgtaaaagggatccggttcagtctggaacaggatggctatgaggtagactgcgcctatgacggagaagaagccattgaaatggcaaaaaagacagaatatgatattgtactgttagatgtaatgcttcccaagcacgatggatttgaagtgtgtcaggcgatccgtgaattttcagatatgccggtgatcatgctgactgcaaagggcagtgatatggataagatcctgggactggaatacggggcagatgattatatcagcaagccctttaatatcctggaagtaaaggcaaggatccgtgccattatccgtcgcagcatgaaggcaaaacgccagaaaaaggaagaacaggccaatacttacattggttccggcgacctgaagatggacacagaaggaagaagagtgtttatcggtgaaaaagagatcaatcttacagcaaaagaatttgatctgttggaacttttagtgcgcaatccaaataaagtatacagccgtgaagccctccttaattatgtatggggaaataaggctatggacagcggagatgtaagaactgtggatgttcatgtaagacggcttcgtgaaaagatcgaaccaagtccaagtgaccctaagtttgtacatacaaaatggggcgttggttattatttccaggcgaaataaggaaaaacagaaggaaaagaaagtcagtgaagattacattagttacagtaggaaaaataaaagaacgtttttttgaggatgccattgctgaatacagtaagcgtttgggaagatattgcaagctggagatcattcaggtggcagatgaaaagacgccggatggggccggtgaaaatgtggagcggcagatccgggaaaaagaggggcagaggatcctggcccagatcaaagacggtgcttatgtgctggcactggcaatagaaggaaaaatgctttccagtgaggaactggcaggaaagatacaaaaactgggagtagaaggcaaaggccatctggtatttgtcatcggtggatccctgggactttccaaagaggtgatggaccgggcagattatgctctcagtttctcaaaaatgacatttccgcaccagctgatgcgggtgatacttttggagcagatctacagaggatttaagatcatagcaggagaaccctatcacaagtaaaagaatatgttacctaaaggtgacagcaccataaaaaggcagttgctacagtgaaatagtaaaattcactttggcagctgcctttttgtgcaatgatgaggcagtttggcgcgattcaatgcaagcgatttatttacctttgttccagacagcatgtcataaaatcatgttgtcctcatatactggagttagaggtacagaaaaatggcagcaaaaacagaaaagggattaaagcaggagatcgtaaatttgtttcctgtaaggctcagacagatattagaagcacttcccctggattttgcccggttagaagagatccgcttgcgctgcggtcagcccattctctttcgcatagcaggaaaggaaatgggaattacgggttctggagatctgacagaactgggatcctcaggaaaactggataactgggaaaaactggaaaaaataagggaaaaagaattaaaagataccctagagatcataggaggtttctccctgtatgcagcagaagaagagctgcgccagggcttttttacagtccggggcggtcaccggatcggggttgcagggagagtgatattaaaagacaggcagatcacgggacttaaagcagcatcatttttaaatgtgagagtggcccatgagataaaaggatgtgcagatcaggttcttccatttttatatgtaaatggaaaatttgtgagtacattgattgtttctccacctggatgtggaaaaacaacattgctcagggatctgatccgtcaggtttctgatggaagcagccagaaggcaggaaaatgcagcttttccggtgtaaacgtaggggtggcagatgagcggtcagaactgggagcctgttatcagggcgttccacagaacgatctggggatgcgtaccgatgtgctggacggatgcccgaaaagcgagggaatgctgatgctgatccggtccatggcgccggctgttgtggcagtagatgagatcggcggaaaagaagatatcaaagcagtagaatatgtaagaaactgcggctgcgccctggcagcaacggctcatggaaattccctggaagagttaaaagaaagagccggttttcgggaacttttagaggaaaaaacttttgagcgtctggtgtttttaagcagaaagcgggaatgccggggaaaagtggaagtggtttatgacagtggttttaaccggttgtattccgggagaacattttaacagaaaggaggatttctatgtttctaaaatggacaggcgggctgctgatcctttttgcaggttcgggaatgggcgtatggctggcatggggatataaaaagcggttgagcactttagagaacctgagaaggatgatctattgcctgaaaggggagatcgtttacagtcatgcacctttagaggaagcctttgagcgcatcggcaaacgggaaaaaggtgttttgggagaactttttacacagactgcagaaaagatcggctgtcataacggagagacattttccaaaatctgggaacagacaatagaagaaatggaaaaaaatggaaaaccactgtttctggaaaaagaggacagggaaaaactcctttctttagggggacagctgggctatctggatacccagatgcaggagaggacgttacttttgtatttggaacagctggaactttctgtttcaagactccgcggagagatccgggaaaaatgccggctcagtacagtcttaggggtgatgggaagcctgtttttagtgattgtaatgctttaggggtagaacgtaattatggatgtaaatctcattttcaggatagcagcagtggggatcctggtttctgtgatctgccaggtactaaaacacagcggaagagatgaacaggcatttcttaccagtctggcggggctggtcatggtgctgttctggatgatcccgtacatatatgatctgtttgaaaccatgaagcagctgtttttgctgtaagggaggaatggctatgaatatgctgactttgggggcagccgggatcgcggcggtccttctggctgtgtggatgaagggagtaaaggcagagtatggtatttttgtggtgatcgcagcccagcttttcttccttttttatggtacagggcggctgggagagatcctggatacagtcaggcagttggagcagtacataaagatccggccggtgtatctcataacacttttaaagatgaccggtattacctacagtgcagaatttgcctccgggatctgtaaagacgccggatattcctctttgggaaagcagatcgaaatatttgggaaactgacgatcctggcagtgagtatgccggtccttctggcattatttggcacactggaccaaatacttacataggggagctgaaaaatgagaaaacaggcaaacaggtggctggtggcagtatttctgcttttttttattttttcaggcattcatatgacggcttttggggaagaacctgcaaaggatcccctggcgcagttggaagaagaaatggggatcggggaagagatccagaggatccaggaatatctggatgggctgcggccagagggaagaacggtctcccttacagatctgatgcaggtcattattcagggaaacatgaaagaaatcgtaaatacagcagggaaactgctggaagatgccctgttttcccaggcaaaggagggacaggcccttttagtacaggtagcggttttagggctgaccggggcggtattttcccatgcagcttccgcttttaaaggcagccagatcccggaaactgctttttacatgatctatctgctgatttttacctgtctggcaggaagttttctgtccagtatccagatcacagcccaggtattagaccagatcctggagtttgtccgtctgcttatgccggcctattttatcagcgtggcctttgcagggggaagtaccagtgctgcggctttttatgagatcgccctggtagctgcctgggcggtgcagtggctgtgccgtcaggtatttctgtccattgtgcgtgtgtatggcctgctggtactgggagatcacatgatggaagagccatttttcagcaaaatgacggagttaatggaaaaaatcgtatcctggggattaagaagtatcctgggactgacactgggacttcagatccttcagtcactggtacttccctatgcggacagtgcaggcagatctgcgatcatgaaatttgcagaaatgataccggggttaggacaggcaaccggtgcagcggcaagactggtgtttggaagcagtgtactgatcaaaaacagtctgggagcagcggcggtcctgatcctggcagtgatcacgttggtaccggttgtgaagctggctgttttaatggtcatgtatcagggtgcagcggctcttttgcagcctgtttgtgacaaaaggatcatttcctgtatccaggggatggcggcaggccatggactgcttttaaggatcaccctttattcccttttcctgtttatcctggtcatagccataacctgcgcaggcaccaatgtcacttatctggctgcgtaacaaacagtaagcctgaaatagtaagcctgaaacataaaaacaggcagaggaaaggtatgggagagattttattagaatgggcaaggaatattatattttttatggtattcctgtctgtgatcagtcatttgctggcagatgtgtcttatgaaaaatatatccgtttttttgcagggatcgtgctgatcctgatcacagtcagccccttaaaaggcggtctggactttcaggagaaagcaggaagattttttgaagaattttctttttttcaggaaaaggaacaggcgggaaaagcactttcaaaggcagaccaggaaagaatgggtgcatttcttgcggaatataaaaaagaagcggaagcgcggatccgggaaaccatacaggcggaaggcgttatctgtagccaggcagaggtggaaatagaaaaagatgaaaaaagcggggaatacggaaagatcaggaagatcattttacatttaaaagaggaaaaaatgacatcaccacaggacgaagaaacgaaaatggtaaaagaaaaagcaggggaagaagtatctgtaaaagtggaaattccccctgttataaccaaagaaaagcaggaaagaccaggcactgagtccaaacaggagcagcagttaaaaagaaaggtggcgcagtattatggactggaagaagcttgtatcgaaatttggtgggaagatgaccagggagaaatggctgtttctgcttctgttaggagtgatcctgatgatcctgtctatgccatttccgggaagcagcagtaaaaagacaggtcagacgaaaggggaaaatgtttcactctgggagaaaaacagttccggtgacggacagcagacagaggaaaacatagttcaggaacctgtacaggcagcatcggcaaaaccggcccaggattatgaaaaggagctggaagatcggatcagtcagcttttaaagtcagtggaaggagtgggaaaagtagacgtaatggtagttttaagttcttccggtgaaaaggttttccgcacagaccggtctgaaaataccagtaccaccaaagaaaaagacgcttccggcggagaaagggatgcagtgagcagccagttagaagaaaataccgttttttcccagtctgcaggccagaatacaggaaacggacctttgatcgaaaaagaactgtatccgcagatctccggtatcgtgatcagtgcccagggaggtgatctgccgtcggtccaggctgaaatttcccaggctatggaagcattatttggactggaaccgcataaaataaaagtgttaaagcgggtggaataaaaaggagtgcggcatatgaagatcagaaatatgaagcaggttggcgagcgggtaaaagagataaagatgaagcgtctgtttcggcgaaaccagatcattatcactacattggctgtgatgatcgctgctgccgggtatctgaattatgcaggaaaaagagatctggaagcagggggacaggttgcggatatgggaagcctggagctttcagatgaagatctgatggcagaaaatctggcagcacagtcagagacagtccaggacattttaagtctggacaatgatccaaatgatacagaggtagctgaggcacagacagaaggaacggatctggcccaggccggcagtgagaacggtgaacagtcaggtatggcggatacagaggagcagaccacgggaaatgatgcgcctgcaggctatgaaaatccgggggaagcagtccttaccagcggtatgagcgtagcagattacatagcaggagtgcagcttagcagggaacagatccgggctaaaaacaaggaaaccttaatgagcctgatcaacagcaccagcattgatgaagcagccaagcagcaggcgatccaggatatgatccgccttacggaaatatcggaaaaggaaaacgccgcagaaacgctgctgatggcaaaaggattttcagatcctgtagtcagtatcacagatgataaagtggatgtggtgatccatgcttcctctattacagaccctgaaagagcccagatcgaggacattgtaaaacgtaaagcagaagtaggagccgatcagatcatcattaccctgttaaatatggcagactaaaaagaactatacatatcctgcgcgatttggtataataatgagtaacagttttatgatcacacagagcaggaggtaagggattttggcagaagaaagtcgcagtacacataaattatatgaaaaagacaagatcggtgaagtacagatcgcagatgaagtggtagcgatcattgcaggtcttgctgctaccgaagtagaaggcgtagattccatggcaggaaatatcaccaacgaactggttggaaagcttggcatgaagaatttaagcaagggtgtaaaggtggatgtgacagaagaacacgtatctgtggatctgtctttaaacatccgttatggttataatatccctgcagtcagcgagcaggttcaggaaaaggtaagttccgccattgaaaatatgaccggtcttactgttcttgatgtaaacattaagatcgctggcgtgaatatggaagaaagctaaaagcatttacgaaagtgcgccctgcaggtatggaaggaggcttctttacttgcagggccttttgtacattttttgttgtttttatgcaccgcctttggtataatcacaggtagtggaaaagaattaagagaaagaggaaaaatgaaatgaccagaagagagttgagagaacattgttttaaaatgctgttctctgtggatttttatacaaccggtgaagaagccaaagcccagatgcagcagtattttcagtctccagaggaggatgatacagcagaagacggcagccttcaggtagtgcataaagtagcagccggagaaaaagacagagaatatctcagtacaagaactgctgatgtagtggataaaatagaagagatcgatgccaagatcgacgaagtagcagctggctggaagacaaagcgtatgggaaaggtagaacttaccatcctgcgtcttgccgtatatgagatgctttatgacgataccattcctgagaaggtgtctgtcaatgaggcagtagagctggcaaagaagtttggcggaaatgagtcccctgcgtttgtaaacggcgttcttgcaaaattcattccaaaagaagaaaagaaagaagaaagcaaggaagatcaggaagcataaatgggaagcgtgtataccgtatctcaggtgacatcttatattaaaaatatgttcacccaggattttgcgctgaacagagtctctataaaaggagaagtgtccaactgcaaatatcatacatccggccatatttattttacattaaaagacggcggcgcacagattgccgccgtcatgtttgcaggacagagaaagggcctggatttcaccctggcagaaggccaggaagtgatcgtatcaggcactgtggatgtatatgagaaagacgggcgttaccagctctatgcaaaggagatcaaaagggaaggcagaggagatctgttccttcgttttgaaaaactgagggacgagctggaagaaatgggtatgtttgatggctgctataagcagcccatccctaaatatgccacccggatcgggatcgttacagcgtccacaggcgcggccatctgggatatcatgaatattacatccagaagaaatccctatgtacagctgatcctttatcctgctcttgttcagggggagaaggcaaaatacagcattgtccagggaataaaaacactggatcagatgggactggatgttctgatcgtaggacggggcggcggttccatagaagacctgtgggcatttaatgaagaaatggttgcaagggccatatttgaatgtcatactccggtgatctccgctgtaggacatgagacagatgtgaccattgcagattatgtggcagacctgcgggctcctacgccatcggcggcggcagagctggcagtttttgattataaacagtttgaagaaacggtagctgcctataaattgcttttggataaggctgcaaaacgaaaactggaacgggcccgtttccgcctggaacagtgccggatgcagctgaaattaaaggatccgggccgtatggtcaatgacagacggcagcgtctggcagattatgaggagatattagaccggaagatcaaagaggcgttaaaagaaagcaaaagactgttagaaaagcaggaagaacgtctgaacaattccatgagggaaaagctgaatttacagaagcaccgtctggcgttagatgccagccagttagaaggtttatctccgttaaagaagttaagcgccggatacggtttcgtacaaaaagagtcaggagaagccataagatctgtaaagcaggtaacagccggtgatccggtccgtatttatgtagcagatggttatgcaaaggcgcttgtgacggatacgaaaaacagcagaccggggagaaagggataaatatggcaggaagaaagaaagcagaagaagcagctccggaaaaaacagccgggatagaggaaaatttcgctcgactggaagagatcataaaaaaactggaaacaggggaaaattcactggaagagacctttgcagggtatgaagcaggaatgaaacttgtaaagtctttaagcagccagatcgataaagtagaaaaacagatccaaatattgagtgagggtgaagacaatgagtgataatacagaattcagaaaagaactggaagagagaacaaaacagatcaatgagcagatcgaaagctatctgccggaagaaaagggccatcagaaaaccatttttgaggctatgaactacagtgtaaaagctggtggcaagcgtctgcgtcctctgtttatgcaggagatctgcagattatttacaggagaagtacagcctgtagttgtaccatttatggcagccattgagatgatccatacttcttccctggtacatgatgatcttccatgtatggatgatgatatgatgcgcaggggacaggcaagtacctgggctgaatacggcgaagatatgggcgttctggcaggagatgcgctgatgatctatgcttttgaggtagcagcgaaggcatttaaagaggtttcagatgcagatgaccttaaaagagtgggacgtgccattgagatcctggcttccaagaccggtatttacggcatgatcggcggacagacagtagacgtagaactggctggcggaccgatcccgaagaataaactggactttatctaccgcttaaagacaggtgcccttattgaggcatccatgctcatcggtgctgttttaggcggcgctgcagaagaagactgtaagatcgtagaaagccttgcaggcaaggttggtctggcattccagatccaggatgatattctggatgtgaccggagaccaggaagttttaggcaaagaggcaggaagcgacgaaaagaaccagaagactacctatgtgactctggaaggtttagaaaaggcaaagaaagatgtagaagctctttctgtccaggcgattgaagatttaaacaaactgcctggaaataatgaattcctggagaatttgatccgtattcttattaaacgtcagaaataaaaaggaagaacctatgatattggaacagataaaggggccggaagatctgaaaaaattgacctctgaagaactttcccaactggcagaagagatacgggcctttctgatcgaaaagatcagccatacagggggacatttagcttccaacctgggagttgtggagctgaccattgctctgtttcgtacctttgacctgccagaagataagatcatctgggatgtaggccatcagtcctacacccacaagatcttaagcggccgcaggatggaatttgatgaactccgtcagtacggcggcttaagcggctttccaaaacggaaggaaagcccctatgattcctttgacacaggccatagttccacttctatttcagcaggtcttggcattgcccagggccgtgatattttaggagaggactataaggtagtctctgtcattggtgatggtgctcttacaggaggaatggcttacgaggctttaaataatgcggcccgtatgaagaaaaactttattatcatactaaatgacaataaaatgtccatttctgaaaatgtaggtggcatgtcaaggtatctgggaggacttcgcacaggagccggttacaatgatctgaagaaaaatgtggcagataccttagaacggatcccggtagttggcggccgtatgatcgacaagatcaaacggacgaaaaacagtatcaaacagctgtttatcccgggaatgctctttgaaaatatggggatcacctatttgggaccagtggacggacacaatatacctgcactgtgcaaggtattaaaagaagcccagaaactggatcatgcagtactggtccatgtccttacaaaaaaaggaaaaggctatgaaccggcagagaagaacccggctcattttcacggtgtaagtccttttgatataaaaacaggaaaacctttggcagaaaagaaataccctacttatacagatgtattttccaagaaactgtgccagttaggagaaacacatccggagttggtagctgtgactgcggccatgcctgacggtaccggagtggcagcttttggaaagaaattcccggaccgtttctttgatgtaggtattgcggaagctcatgcagtgaccagcgcagccggtatggcggcagcaggactgcggcctgtagttgcggtgtactcctcctttttacagagaggttatgaccagatcttacatgatgtctgtatccagaacctgccggtgctctttgcagtggaccgcgcgggactggtaggaagcgatggggagacccaccagggaattttcgattattcttatcttacttctattccaaacatgagcgtggcagcaccgaaaaatctctgggaactgcgagctatgctggattttgccatggattataaggcaccttttgccatccgctatccaagaggtaccgcttacagaggcttaaaagaatttatgcagcctattgcttatggaaaaggggaaataatctatgaggaagaaaacattgcccttttagcagtgggaagtatggtaagtaccggagaacatgtacgggaaaagttaaaagaagagggagtttcctgtacactggcaaatgcccgttttgtaaaaccttttgacaaagaactggtggaccgcctggcaaagaaccacagactgatcgtgaccatggaagaaaatgtgctccagggaggttttggacttcctgtaactgcctatatccatgaacattatccgcaggtaaaagtgatgaatattgcacttcctgatgcctatgttgagcacggaaacgtgtctgttttaagaaaaggactgggaatcgacagcgactctattatccagaggttaaaagcagaaggatggctctaaaacagaaagatcgataagatagatataaggagaaaataaatgaaggaacggttagatgtactgcttgtaaagcgcaatctggcagactccagagaaaaggcaaaggctctgatcatgtccggtatcgtttatgtaaacgggcagaaagaggataaagcaggtaccacctttgatgaaacagcacctattgaggtgagaggaaatacattaaaatatgtaagccgcggcggcctgaaattagagaaggcaatgacccatttcggcgtagagttaaaagataagatctgtatggacgtaggcgcttctaccggcggatttacagactgtatgctgcaaaatggcgctaccaaggtttattctgtcgatgtaggccatggacagcttgcgtggaagctgcgcaatgatgagcgtgtagtctgcatggaaaagactaatatccgctatgtgacccatgaaaatatcccggatgagatcggattttccagtattgacgtatcttttatctctctgaccaaggtgcttggacctgtaaaggctcttttaaaggatgacggtcaggtagtatgtctgatcaagccacagtttgaggcaggaagagaaaaagttggcaaaaaaggcgttgtaagggataaggctgttcatttagaggttattgaaatggtcattgcctttgcaaaatccattggttttgagatcttaaacctggaattttcaccgatcaagggaccggaaggaaatattgagtatctgctgcatctgcagaaccacccggagggcgaagacggaccggtcatttatgaggaaatgcctgttgatccgaaaaagatcgtagaggaagcacacgcagcgctggataaagaataaggttttaacataggggacttatgaaatatttttatgtaatatccaatttaagtaaagactatgtactggatgttcaggatgaggttcagtcctgcctggaaaaaagaggggctgtatgccgttatatgacagattatgagcgtatgaaaaacggcagacatacgcccggtgaatatgtgccggaagatacccagtgcatcatcaccattggcggtgacggtaccctgatccaggcagcaagagatctggcaggccggaatatccccatgcttgggatcaacaggggacatttgggctttttaaaccaggtggaccgcacagaggatattgatgctgcgatggatgcccttgtaaacgaacgtttccgtttagaacatcgtatgatgcttcggggaactgtatttcatgagggaaagccggtatttcaggatattgctttaaatgagatcatagccaccagtgcagagcatctgcgggtactgcgctatgatctggctgtaaatgatgaatatttaaatgagtatgcagcggatggagtgatggtggcaacccctaccggttctactgcctataatctttccgcaggagggccggttatggctcctgcaggccggatgatggcagtaacacctgtatgttcccatactttaaatgccagaagtatcgtcatttccgaagaggaccgtgtaaagatcgggcttttgggaaaaggactggttacttttgacggagatacttcccagaagacaggtcccggggattatctgatcgtagagcgctcacatatggaaacggtaatggtaaaattaaagcagatctcttttatgcaaaatctgagtaattatctgggaaatgtctgaagatgtggaaacagatgggaggaaaagcagatgaaattggaacgtcacagcaagatcgtagaactgatcggaaaatatgaaatagagacccaggaggagctggctgaaaagctgacccaggcgggttttaatgtaacccaggcaactgtatccagggatatccgggaattaaaactgacgaaagtgccgggagaaaatggacgtcagcgctatatggtccttgaaagtccaagaggaacttctgcttccaaatatatccgcattttaaaagacggttttgtatccatggatatggcacagaatatccttgtgatcaaaacagtttccggtatggcaatggcagttgcagctgctcttgatgctattaaattccatgaagtagtaggctgtattgccggagatgataccattatgtgcgcagtccgcagtgtggatgataccattatcgtaatggaaaagatcaaaaaaatggtggaagattaaactggatttagaacaaaagatccgggaaaaaagatagaaagagaggaatagcatgcttcttgagctccatgtgaaaaatctggctctcattgagaaggcagatgtagaatttggagaaggactgaatatacttaccggcgagaccggtgcaggtaaatcgatcattattggttccgtgaccatggcgttagggggaaaagcgtcaaaggatgtgatacgccgtggagcggaccatgcatatattgagctgatctttttcgttgacagtaaggaaaagaaaaaggcgttaatgcagcttgggacagagccaacagaagaaggaatggtgatcatttccagaaagatcatgccttccagaagtgtcagccgtattaatgatgagactgtgacaatggcaagacttcgtcagatcacaggtcttttattagatatccatggtcagcatgagcatcagtctctgctgtataagtcaaaacatcttgagatcctggatgcctatgtcaaggcacagacccagccggtgaaaaggaaaatcgaagaggagtacaaaaactactgcaagttaaaggaacgtcttttatcttttaagacagatgaggacgcaagactgcgggagatggattttttgcgctttgagatccaggagatcgaaaacggagaggtaaaagagggagaagaggaagaacttaccttaaaataccgccgtttcgcccatgcaagaaggatcgcagaggaactggaaaatgccagaggactgctgcagcgtgactttgcagctcaggccctgcgctcggtagaacaggcagctgagtacgataaggcattagaggggataagagaccagctttatgatgcggaagctattttaaatgatgcttccagggagatctcttcttatatgggttccatggaatttgatgaagaggtattccgcaccacagaaagccgccttgatcagatccatgatcttcagagaaagtatggaaataccacgcagctgatgcttgaaaatctggaaaagaagaaaaacaggctggaagaactggaaaattttgacgcttacagggaaaaaacggaaaaagagttaaaagaagcccaggatcgtttagaaagatgctgcgcagaattatccaagatacgaaaaactgcgtccagacagctggtggaaaagatcaaaaaaggactgctggatctgaattttttagatgttcagtttgatatggaatttgatcggctgcctcattttacagcctccggctatgacgaagcccagtttttgatctccaccaatccgggacagccggtgcgccctcttatggaagtggcatccggcggtgaattgtcacgtatcatgctggcgatcaaaaccgttcttgcagactccgatgatatcccaactcttatttttgatgagatcgatacaggtatcagcggaaggacagcccagaaggtttccgagaaactttcctatattgcaaagagccatcaggtgatctgtatcacccatctgcctcagatcgcggcgatggcagatacccattttgagatccataaagcagccagtgaaggaagtacagcgacttccatccggcgccttaacagggagcagacagtggaagaactggcaagacttcttgggggagcaaagatcacagatacagtgatccagaatgcccgtgaaatgaaggaactggcagataagacaaaataagcaactgtccgtgcaaggcataagcaataaccaaaataaaacagattggaacgaccgttcacagaacatactaacagggagcgcaagagtatcaggacttgcggctccctgtttttgtacagagaaaatgcaccgatggcgcatgttgcaggctgcaaatggagaaggaggtcgttctatgaggggaaaatcaaatttttataagcatctggtcaggatattctggctgtccctgatcgtgggtacagttgggatctggtactatgtggaccggagcataccggaccgggtcagcgtaacagaacatgctcaggaagaatttacattttcccttccctggcgggctactgtatacagtgaaagcgaagaagtggcactgggaaataagagcaatatcccggccgagcagatcaccataaacagcagagagccattttccatgtatgcaggaaagaaaggcagttatcagctggacctgaaattatttggtgtgatccagtttaagaacatacaggtagatgtggtagatactaccaggctgatcccctgtggcagtcctgtgggaatttatttaaagtctaagggaattatggtcatcggtaccggccgtattaccggggaaaatgggatggaaatggaaccggctgtgggaaaattaaaatccggggactatattgaagcctttaatgggcaaaagcttgggacaaaggaagagctggcagaggcggtcagccattttcagggagaaaatgttacattgacagtgcgcagaaatggggcagaaacacaagttaagataaagcctgtaaaaggaacagacggttcctccaaattaggtgtgtgggtgcgggatgatacccaggggatcggaactgtgacttatatggatctaaatggaaaatttggtgcattgggccatgggatcagtgacagcgatacaggggaactggtggagacttccggaggaaatctttatgatacccagattttgggaattgaaaaaggaaaaataggaacgcctggaatgctttccggggtgatctactatggtccaaagtcggagatcgggacagtgacagaaaatacagattatgggatatttggaactgtaagccagactttcttaaaagaacacagaaccgcctccatggaagcagccaggcgccaggaagtaaaaacaggacctgccctggtgcgtaccagcatctcagggcaggtgaaagattattctgttgagatacagcggatcgatatgacaggaaacaagaaaaacaaaagcctggtgatcaaaatcacagatccggagctgttaaatctcaccggtggcattatccagggaaccagcggttcccccgtaatacaaaacggaaagatcatcggggccatcacccacgtatttgtccaggatcctacaagaggatatgggatattgatcgaggatatgctggggcactgataaggatccataattttatgcaaaacagtgaataaagtcacaaactaataaaaattgacaaaattcgacaatattagataataaaagataactgttaataaaatgttaaaatgtctaataatgcggtggctttttcttgaaatatgacgatatttgcatttataatatctaccataaaagacttaacgcatcaaagcgttaaataatgaggaagcactctataagtaaagaatgaaattgcgttaagggatgcaggaggtagaaacatggaaaatgtaaatgttgtaattgtagatgataatcctatgatcttaaacacgttagatgaagtgatcagttctgaagcaggactttctgtaattggcagagctgataatggaaaagacgccattgacatgataaaagatacccaacctgatgttgttttgctggacctggtaatgccgcagatggatggtattacagttgtggaaaatattaaaaagaaaacatctatgttaaagaacccggcgtttatcatcttaagtgcagtaggcggagagcagatgacagaagaggcatttcaggcgggtgccaactattttcttatgaagccgtttgataaggatattcttgtaaataagatccgccgtattggcaaacgtccggtccgtcctgttccgggaaaggtcttagaagcaccgttaaaggcagcaacaccggaagaagctgctatgaacagggaagaatatatgaaggagcatctggaaacggatattacaaaaatgctccatgaacttgggattcccgcccatatcaagggctatcagtatcttcgggatgccatcagcatggtggtaagggacagggagatgatggaggcagtaacaaagatcctgtatccggagatcgcaaagaaaaattataccagttccagccgtgtagaacgtgccatccgccatgccattgaggttgcatggggaagaggcagcctggaagtgatcgatgaactgtttggatataccatcagtacaggaaagggaaaaccaaccaattcagagttcattgccctgattgcagataagatctgcctggattataaaaaaattgggatatagtaaattgccggataccccagagtgcagtgtaaagattttgttataaaaaatttactaataacttctttcttatttatcaaaagtaaggtatactattgattaaggcaaaacgccacctggaactcaggagagggaggtttggatgaaaaagattttatttgcggcatctgaggcagtaccatttataaaaacagggggattggcagacgtagttggttcacttccaaagtgttttgacaagagatactttgatgtaagagtcattatcccaaaatatctgtgcatcaagcaggaatggcgggacaagatgcagtatgttgaccacttctatatggactatctgggacagagtcgttatgtgggcatccttcagtatgtacatgagggaattacattttactttattgacaatgaaagctattttaacggaccaaagccatatggggactggtattgggatctggagaaattctgtttcttctgccgtgcagctctttccgcattacctgtgatcggcttccagccggatgcagtacactgtcatgactggcagacaggtctgatcccggttctgttaaaagacagtttccatggcggagatttctaccgcaatatgaagtctgtgatcaccatccacaacctgaaattccagggcgtatgggatgtaaagacgattcagagatttacagaactgccggattattacttcacaccggataagttagaagcatacaaagacggcaacctgttaaagggcggtatcgtttatgcagacgcgatcactactgtaagtaatacctatgcagaagagatcaagatgccattttacggcgaaggcttagatggcctgatgcgtgcaagggcaaacagcctgcgtggtattgtaaacggtattgattatgatgattttaacccggaaacagacaaatatatcgtacagcagtatacagctaagaatttccgcaaggaaaaagtgaaaaacaagaaagcccttcagcagcagttaggacttcctgtagatgaaaagaaatttatggtaggtatcgtttcccgtctgacagaccagaagggacttgacctggtacagggtgtgatggatgagctttgcagcgacgatatgcagcttgttgtattaggtaccggtgatgagcggtatgaaaacatgttccgtcattatgactggaagtatcatgaccgcgtatctgcacagatctattactctgaggaaatgtcccaccgcatctacgcaggatgtgacgcattcctgatgccgtccttatttgagccatgtggcttaagccagctgatggccctgcgctatggtactgtgccgatcgtcagagagaccggcggtttaagagataccgtacagccttacaatgaatttgaaaataccggaaccggcttctcctttgcaaactacaatgcacatgagatgcttggaagcgtccgctacgcaaaatacatttattataacaaacgccgtgagtggaataagatcatagaccgtgatatggcagctgatttctcctggggaacatctgcagccaagtatcaggaactttatgactggctcattggctaaaatggcaagtttagaaagaggtgtgacactcatggatatgccggaagcaaatgaatatttaatggatccggggtatatggagtgtgtggcagatatattagaccatcctgtattccagtccatggaccagtatatacagcatggaacaacgacctgtaaatgtcattgtatacaggtatcttatctggcttataaattgtgtaaaagatttgggggaaactggaggagcgctgcgagagcagggcttctccatgatctttttttatacgactggcacacgcacgccagggaaacaggagatcatttccatggctttacccacccgaggacagccatggaaaatgcaaaacagtattttgaactgacagatgaggaaaaagacacgatcctgcgtcacatgtggccgctgacaccggtcccgccgtcaacaagagcgggctatgcggtcacttttgccgataagatgtgttgcctggaagaaacaaaagctaccgtgaaacggtacgcggctgtaccgggacatcttctgtttgcgcagacggcagaaaggggaaaattttaaaatatggatacatggaaagcaatgctgggaaatcaggttcttgtcagtgctgtagtgggctggacagtagcccaggtattaaagaccctgatcgactttgctttgaataaaagctttaacgcagagcgtctggtaggttccggaggtatgccaagttcccattcagctactgtgtgcggactgacgacagcggcggctttaaaatatggtgccggatcctttgaatttgccatatcctttatactggctatggtagttatgtatgatgcggtaggcgtaaggcaggagactggcaaacaggccagactgttaaattccattttacttgaaaatccgctgaaattaagcagtgaggtacttcagcagaagttaaaggaatatgtgggacataccccgatccaggtagtggcaggtgctattttaggtatcgttctggcactggtcatcaataactgttattaatgtaactatttatttgtaatgtactttccttatggaggaattgatgagtatttgtaattatataaactggttttttctctacagctttctgggatatcttctggaatgtattgtgctcaccgttgaatataagaggccggtagtggaccgtggctttggccatggccccttttgcgtcatatacggtttcggggcagtgggcgcctgcctgcttttaagccctttgtcagatcatcccatagaattgtatacagcatccatgactatggctacgaccatggaactgataacagccaatgtgatgatccggctgtttggaagtttctggtgggattacagccataaaccatttaactacagagggatcatctgcctggagagcagtctggcgtggggacttttaggcctgttcttcttcaattatttagacggctgggtgcgcacagcagtaggctatatcccgggaaggataggaaaggtcctggcagtccttcttaccctattttatgtttttgactttatcagatgtatccgcatgcgtctgggaattccggaagaaggggaagagggagaaacagaagagaccataggaagattgaaggtatattaaaatggaattaaaagaagatttaaagggttggcaggtagtgttagcatctgcctccccaagacggaaagaactgttggaacagatcggtatctgcccacagatctgtccaagcaatgcagaagaaaagaaagacgagacagacccacagaaactggtggaaaaactgtccagtgtaaaagcagaagatgtagccggttgttttccggcgggaaccctggtgatcggagcggataccgtagtttctattgtaaaagacggggaaagtgatccggtgatcttaggaaagcctggaaccgtagaaaaagcagaagagatgatctcgctgatccagggacgcacccaccaggtatataccggtgtgacggtgatcttatgtctgggagcggaccggtttgcagaaactacttttgcagaaaagacggatgtggaagtctatgagatggcagaagatgagatccgggcatatgccgcaagcggggaacctcttgacaaggcaggtgcctatgggatccagggatcctttgcagcttatatcaaggggatcaaaggagattacagcaatgtagtaggccttcctttaggacgtctctgccatgagataaaaaggcttttggaggaacgggaaaatgattaagctgatcgtcacagatgtagacggaactttggtggaagatggttttaccaatgtagatccacggctttttgatacgatcctgaaactgagggaaaaaggaatccagtttgcagttgccagcggaagaccctgggccagtgtggaacgtacctttgatcctgtaaagaaaaaggtgttctatatttcaaataatggttcttatattggctgctatggcagaagcctgtatgtatatgccatggaccgggagatcgtaaagcggctgatccatgcagtgcggaaaaatccggaattttccatggtatatgcagcggaagacggagattatacggagtccaaggacgatgctctctgcaactggctggtggaaagctataagtttaatcttcaccgtgtggatgatctgctgactgtgccggttccatgtaccaaactctctatatacagagccggcggcgtggaagaagcggtaaaacctctggtagaagaatttaaggacatccttcagatctcctgtgcaggagacgtatggcttgactgtatggctaaaaatgtaaataagggtcatgcggtaaaagtgatccaggacagtctggggataaagccggaagagaccatggcgtttggggatcagttaaatgatatagaaatgctgcagcaggcttattacagtttcgcagtggcaaatgccagggatgaagtgaaaaaagcagccaggtttcaggcagacagcaatgtaaaccagggtgttttaaagatcctgcagaacctgctgtaaaaaggagtaagtaacaattgcagatcacagaatacttaaataagagggtatttttgattttcctgacggtcatgcttttctttgtttcaggctgcagcaaaatgccggaaggaatgttaaaacaggacgcagagcagtatacccaggaacagatacgcctgatcgcgataacggaaagaaaccgctatcagaatatttatacagggcagctgtggggagtaacggcagattccaatggaaatacctttgaaactcttttaaagaaccaggtacagcagtttttggaagaactggcagtagtagataggatggcccaggaagagaatatttcccttacagggcaggaagaagacgatattaaaaatctttccagtgaattttttcagagtctttctaacgaggacctgaactatctgcagataacggaaaatgatgttttggatctttacagaaaatattatctggcagataagacggtgggacagctgaccgatacgaaaaatctggaagtcagtgatgcagaggcaaaagtgatccaggtagaacggatcgaaacagactcaaaagacaaggcagaagctcttttaagtatggtaagcgaagaaaaagccgattttttggcgattgctgaaaaaaattccataaacagccagatccagtatcagatcggctgggatacaggattaaaagagccggaccggtctgcttttgatctggaggaaaatgagatcagccccatcatagaggcaggaggccatttctttatccagaagtgtaccaatgcttatgaccagacagctaccgccgaaagaaagagcaaactggcgcaacagaagaaaacggaagcgttccggcagatctatgagccgtatcagcagaaataccagatccgcctgccggcagatctctggaaaaatattgatttttccgctggggaaggctgcagtaccgataacttttttactttatatcacagttatttcagtaattaagatcataagggggtacagaaaaatgacaaaagataagaaaaccaatctgttaaaaggagccatgtttgcagctcttttatcagttgcagcttcttttcctgcatcagcaaaggaagagcgcactcctgttggccatattacactgaattttaacgcagatgtgcaggcaggtgatacagatgctacgatctctgtttctgtagaagatggaaactgctctgtagaaagtgccgattttatcaatgagcaggaatactgggccggcggggaaaagccaaaggtagaagtatggctttcagcagacagtgactgttatttttcaaaatcagcaaaaagtgctttcacttttaatggagataaggtaaaatatgtttcctgtgcaagcaagtatgataaagaaatgctgaaactggtggtaacactggaaaagctggataaagatgatgaggacctggatatagacggacttagctgggatgcagacaacggaatcgcaaactgggatcatcagagtcttgcaaagaattacaaagtacgtctgtgcagaggaaagggaagtacttccaatgacaatggcattggatctatttatactgtaaaggagaacagctttaacttttcagagaagatcccgaaagagggcacttattactttaaggtccgtgcggtagactccaggggtaatcagggagactgggaagagtcagcctggtttgaagtgacaaaagagcagatgaaagactggaaaggccactgggagaataatgaaaaaggctggtggtatgtaaacagagatggctcttatcctgtaaacaactggcagcagatcgactctttatggtatttctttgatgaagaaggttatatgaaaacaggatggatccactggaatgaaaaggattatttctgtgatgagtccggtgccatgctggtaaatacagtaacaccagacggcgcatctgttggggcagatggagcaaagctgtaaatagaaaggcagatgagagtgctctttgctgtattcacctgtatctgctatgcaacagggatcgttgagtttgcttttgacgcggaaaacggtgacaaaaagccttgtaatttcaaatgggttatgatatagtataaaatagttttgtttaactattagaaacggagaggtgtagacaaatggcagtagttaaggttcttttatccattatatatgttgttctgggtatagctatttccgtagtcatcctgatgcaggaaggcaagtccaacggactgggaagtgccatcggtggtatggcagacagctactggagcaagaataaaggacgttctatggaaggagctctggagcattttaccagatacggtgcgatcgtatttatgatccttacactggtcctgaatattcttatgaagactcagggataatagaaagagacagtcaaaacacccttcgtgtaacagacagaagggtgtttttttatgtactaggaaattccgttggaactccctagtacacaaaaaggcacgacctgccaacgatgcgcactcgcgcgatgaggaagtttgtcgcaagcgaccgcgctcggcgcgagaatgtgccaaggcacattcttatttaatacaaaggcaaatataagggcacagatcgcctgcctggatggtaggtgagacatagataaagtaataaagaaaagaggttatatggacagagagttattagaacagagaaaacagatgctgacagaactggtacatgacaaggcttatgtgcctatgaaagcaaaagagatcgccatgcttttaaatatccccaaggcaatgcggggagaattacaggaagtgctagacgaactggtttcagaaggaaagcttgggatctcaaaaaagggaaaatatggaaaaccggagacatttgctgtagttggtacttttacaggacatgcaagaggctttggctttgttacagtagaaggaatggagcaggacgtatttatccctgaggataagacaggaagtgctttaaatggtgataaggtacagatcgtcattgagtctgagggccgcaacggacgcagggcagaaggtacggttttaaaggtattggaacatgccaacagccagctggtaggctattatcagaagaataagaattttggctttgtgatccctgatgaccagaagatcgctaaggatatttttatcccacagggctgtgatatgggagctgtgaccggtcacaaggtagtagtaaaggtaacagatttcggtgatgagcgtaagaagccggaaggacggatcaaggagatcttgggacatgtaaatgatcctggtacggatattttatccctggtacgtgcttacaatcttccagaagtctttcctgaggaagtaatgaaggaactggaacatgtgccggacagcctgcctacagagggcttaaaggaccttccggaaggttttgagggaagaaaggatttaagggatctgcagactgtgaccattgacggggaagatgccaaggatctggatgatgcggtgacattggagctgctggaaaacggaaattaccgtctgggcgttcacattgcagatgtaagtcattatgtaaaagaaggcagtgaactggataaagaggcgttaaagcgaagcaccagcgtgtatctggtagaccgtgtgatccctatgctgcctcacaagctttctaacgggatctgttctttaaatcagggaacagaccgtctggcaatgagctgccttatggaagtggatcctcatggaacggtagtggatcatgagatctgcgaaagtgtgatccggtctgacaggcggatgacttatacggctgtgaatgctattttgtcggaggcagatacaaaggagaaagaggagcaaaaggctggtttactggaagagtataaggattttgtggctatgtttgagcgcatgaaggaactgtctgctattttaagggagaagcgcagcaaacgaggggccatcgattttgattttccggaaagtaagatcattctggatgagaaggggaaaccggtggatatccatccttatgaacggaatgtagctacaaagatcattgaagattttatgctccttgccaatgagaccgtggcagaggattatttctggcagtctgttcctttcctttacaggacccatgatgatccggatccggagaagatgaagcagttaggtgtgtttattaataattttggatattcgctgagattgactaatggggaagtgcatccaaaggagctgcagaagctattggacaagatcgaaggcaagccggaggaacctcttcttgcaagactggtcctgcggtctatgaaacaggcaaagtatactacccagtgtacaggacattttggattggctgcaaggtattatacccattttacatcacctatacgtagatatccggatatgcagatccacaggatcatcaaggagtgcctgcgtgggggattgaaagagaagagagttgcccattatgagaaactgctgccgcaggtggctgtacagacttctgcattagagcgccgggctgatgaggcggagcgcgagactgagaagatgaagaagtgcgaatatatgtccaggtttgttggacagacctttgagggagtgatctccggagttactaactggggcttttatgtggagctgcctaatacagtggaaggtctggtgcgcatcagtgagctgcgggatgattattatatttttgatgagagcagatatgagctggtgggcgagatgagcagaaaagtgtataagctgggccagacagtacgggtagttgtagccggtacggacaagcttttgcggactgtggattttgttctggaaaatcaggcagtataatggtatgatagtgggagcaaatgagatagaaaaacagagatcagttctgtttgcagggcaaagaaactgaaaatgggaggtgtttatcatttctaaggaaagtattaagctgatcgccaataataagaaagcgtatcatgattattttattgatgataaatgggaagctggtattgagctgtttggtacggaagttaagtccatccgtatgggaaagtgcagtattaaagaggcttttgtgaagatcgataagggggaagtgtatgtgtatggtatgcacatcagtccttatgagaagggaaatatttttaataaggatcctttgagagtgagaaagctgcttcttcataaatacgagatcatgaagttaaatggaaagatcgcggaaaagggatatacgctgatgccgctgcaggtttattttaagggaagcctggtgaaggtgcaggtgggacttgcaagaggtaagaagttgtatgataagagagcggatattgctaagaaggaccagaggagagagttggagaaggattttaaggtgaagaatttatattaaggtaaaaagtcgctaaaggtccgcaggggccgctgaaagcctgacctcctttcagcggcccctgctatttttatatctatatttataaaatggggatattagatattgcaaagaccatattcgcaatagctccatgggggatatttaaacacatttaatcactaatgtcaattttaaatataaaaaagcaagtggatttccacttgctttttagtgacctgaccgggaatcgaacccgggtttacgccgtgagagggcgtcgtcttgaccgcttgaccatcaggccttattctgttttgtcttgactgttcgccgctgactcgtatataatagcacagcggtatgggtttgtcaaacatttttttgaaaaaatttaaaatttttttgggggatagtttggagggtaaaaaggtaagtaaaaagacccgtcggggaacgggtctttttaaggagaaggtatttcgtttcttatgggggtgtagcaaaaactatataatgtattggggggttacgtctattataatagcataggagtttggaaaagtgtgcacaaagattgaaaaatatgaaaagctgttttgtgcaaaacacacatttccggtataccggtggacaaagcttccaagagtacatccctaaaaaggaggaggcggactgaaaactttccagtccgccgagtattatgaaaaaaagttgtttgcattaactctttacgctctttagtatagaaaacaatcgtgaagaaagtttgttcaaattgtaagtaaattgtgaacggaatgtaaagaaataaaatagcaactggctgccatttgaaaggccctatagctttgcgtcacagtctttcgactgctttgcctaaaatatattgtttctttaattaataccttaaagatttttgtgtcaaaaaaaatatagggtaaaagacttgaaatatgcggtaaaattcagtagaataggcaaaaatcattaaaaacaaaagagggggcacagtatgaagagattgatgccaatatttattgttatattgctgtcaggctgtggcattttgacagcttatgcgcctaacatgctttctatgatcgtagttgcggttatgggcgttgtagtgcttttaggaattatatatggactgataccggtacttacatttacacagggactgttaacaggccagaagagtatacagagagcctcggaagcagaggaaaagtcggtctggatcaccgctttacagatggaccgttttttcagacagaagaaaatggaccagttgtttcgggaatacagggacaaggtaaagcagcagcgccagaatggacagatcgtcagtgatcttgaagatattttaaatgaagatgtcctggctctttacagctggcagggagtcgttgcacagatccctggaacattaacaggtcttggaattttaggtacctttatcggccttcttaggggtcttagaaatattaacttcgttacggttgaggcggcacttagcagtgtgcagtccattctgaccggtattgataccgcattctatacatccatagcaggtgttatcctgtccattctttttaatatatctaataatatcctccgtaatacaatggatcgtgaaatggggatctttctggaagtttttcacagagtggtccttcctactactcaggaacaggaacgctaccgttcccgcagagagacaagacagatcatggatctgttggaccgtctgccaaagaaagatgattattcagcttccggtatgggggcaactgcagactcagccattggaaatgagcgtcttctgatgccgcagatcttaaatggccttaaaaagaatgaatttatttttctgttacagcctcagtatgaattaaatacacgaaagatcataggtgcagaagctttggtgcgctggaaccacccggcgttgggcgagatctcacctgcagtatttattccggtactggaaaataacggatatattacaaaactggatcagaagatctgggaagatgtatgcgcaatgatccgcagatggatcgatgagggtataaaacctcttgcgatttccattaacgtaacaaaaacagacctgcttgcaatggatgttgtggagatctttgatgaacttctgaaaaaatacaggataccgccaaaatatttaaatatcgatattgcggaaaatgcgtacaaagaggtttacggcattgtatccgaagtggaaaagtcccttcagcagaaaggcttccgcattgccctcgatggttttgacggtgactatatgggactgcactctgtaggagagatcggagcggatgtactgaaactggatctgcgcagcctgaataaagagaagaagagcggcagtgtacaggatgtgtttgaccgggcaaagacactgaggctgacccttaccgcagaggggatcgaaagcatggaacagttatcacttctgcgtaagtgcggatgtacagaaggccagggatatgtattttccagaccattatcaatcgaagagtttgaaaaaatcctaaaggtaggacaggatgcatgagacggcgtaggaaagaccagaacggagagtataattactggcagcctgctacggatatgatgacaggacttgtatttgtcctgatgctgatcgtagcgctgttgggcctgtatcttttaagtgactatacaggatataaatatgatgaaacagaaggcgtagaggagacaacggcacaggagacccgtccggatgatgacggctggagctggaaggaatataaaggcaacggcgatcatgaggatgtaggagatggggccggagacggaggcggatccggacaggagcagcctatcatccagaccggcggaggcggttacggtgacgaaggcatcaaatcagcggtatttaccgagctggtggatgacgaaacagaccgtattatcccggatgagggagtccgctttgaactgtaccgcacagactggggactgcaaaatggaatgggagcccttcagatcctgaatacctattatccggaaaagatctcctatcgtgaatatgagacaacagaggaaggcgtattttatctgccggaaaaaatctaccagggagattatttcttccgggaattaaatgaaccggaaggatatgacgcggcaggggatacctattttaacctggataagatgtatgactggccggatccttttgtagtccagatccgtgtatcaccaagcaagaacgtgatccgggtgcagatgtcagatctgttaagcaaagacccggtaggaggcggaaccttccaggtacgggcagcagaagatgtggctacgctggatggtaccgtgcgctatatagcgggacagctggtagataccattacctgtgatgaaaatggttacggtgagagtaaggaactgtatctgggaagctatacactggaacaggcgggaattccccgctattacgccgggatcaacgaacagccggaagctctggtagagaagaaaaacggggaagaacccccgatccatgagattgatacagaaaagacaaagatcactttaaaactttcagatgaattatatcagcagcagccgctgtccggggcagtatttacagttaccaatggaacaacaggtgtttcccagactgtagagacagaccaaaatggccagatcctccttacagacctggataagaataccagttataagatcagacagcagcagaccatagaagattaccagctggatccgatcgaatatacagaagatgtagatgcctatggacgcataaacggggaaaaccaggcagaaatggatctgacaaacaggatgcttcgtatatctgtccatggaacggatatgatcctgcgaaaagatgtagcagatatccagttatccctttatgacagtcaggatcagctgatcgagtcctgggtatcaggggaaagcggaaaaatgttcaccaacttaaaagaaggcagttactatgtgcttcagggagatgacggggagaagcgttatgactttacagtagcagatacagcgcaggtacagaactggaatgtaacagtactgactcttcggggcattcttacactggcagccggtatggttggcggaaccgttgtgatcattcttctgctctttgcaggcattacactggcaggcagaagaaaaaaagaagataagaaaaaagacagtgagaaaaaacgatgaatggtgtacagatcagagtaggagatttactttacgcgatcgggaaacgctggaagatgatcctggcgtttgtcctggttggatgcgggtttggtgctgccttaagcggcatatcgtatgtacagggaaattatacaaattacaggatcaactgttccattgcagtaacatcccagtctgagacaggaaattttacagggaattccagttattttaaccctaatgatttttatctggctcaggatatggtagatgcagtggggtatgtgatgaaaagcgagcgggttctgcgtgaggcagcggaaagtgtgagaatcgttgatccggatccggtggccatcgccagaaatctggatatagagcgttacaatgagacacagatcattgagatcagcttaaaatggcatgacgcagacacagggatccgcttaatgaacgcgatcttggatacttcccgtgaggtgcttccaaaaacattaatggtaggatctgtttctactattgatgagccgcaggcagaatatatcatgggaatgggcggcctttcccatatctggctgatcacaggtgtgatgggctttatcatgggagccggtatggcaatgctggagctgatcatgcgtccgactctgctgaacctgaaagatgtggaaaatgtgtttggcctggaaactatggggatcatcccaaatgaccaggaatatttcagggacggaagggtgattttggaaaaagatggaatgaccgactcagcggtccgccagaattttacatctgctgcctatattttgcagaaccgtctgggtctgaaagatgagacctgcagtttttatgtaacatccgcagaagaaggggaaggaaagagtacagttgctgccaatctggcagtacagctgtccgatatggaaaagaaggtccttcttgtggatctgaataccagaaatccccgtctgggcagtatgtttttacattctgtggattacagccgtacattaaatgccctttataaaggggagacggatccgctagaagcagtgatctcccttaccgggtatctggacctgcttccatccgtactggaacgaaatgccattcctatggacggacaggtatttgattttatcagaggccttgaaaaggactatgactatgtgatcattgatactccttctgttggacaggtttctgatgtattaagcctgaaccagatcgcccaggcagtgctttttgtgatccgttatgatgatgtggctcttccgatgatccagaatgccattgacaagctggacaagtccgggatccgtatccttggctgtgttgtaaatgccgcccagaaaacagggggaaaatatttcggcggtgaacggaatgtagtagaaaaccggggaagaaaaccgaagaagccggaagcagaaacaatgaaagaaaccatggatgatctgaatgatctggaagacatgatgaaatccgcaaaagagacccaggctttaaaatctacccatccgcatacagaggaagataccgcatttaatggtctgttagaagaactgacagatgatctgttagagacatcaaaccggctttccaaccaggaggccatcgaagctctggtacagatgggaatgaatgagagcggaagggaagagtctcaggaggaacttgaaaatgaggatacagaacagtcagagacagaccctgagcagtcagagcagccgtaaagatcttttaaagagccggatcgttgacacaactgttatctttatcctgcttgtcagctttggatttccaggtaaatataccatgctccttggttctgccagcagcaagatcctggaatacgcatcctttggggcgcagcttcttctcatgctgttttccagcagtgaagacggctttatgagcctgaaactgctggatctgaaagaaaaatacgcggttatttatttcatggcagctgtctatttcttagactccatgctggtgacacggtatcccagtgaacagcttatttcctgtatccgttatacagccaccatctttttcgcactttggatggtagagtattatgacggggagaaactgtttcatctgatcgcagcggcacaggtgatatttacctgtcttacatttgcttttatgcttttaagaccgggagctgttttctcacaggaacagggagaacatgattttaccggttttttaaggacaaagaacaatgcggcatcccagttttccatttgcattctccttcagatcgcatggtttcgtattctgcgggcaaaacagatgatcgtatcgcgaaagtatctcctttctttacttgcacaggggatctttctggtcctgtgcaatgccaagggagctgtgttatgcctgatctttccgctactgtatgtgctgtttggaaaatataaggaggaaccgggaaaaagactgccccttggggtgatctatgttaccttaagcgttgcctttctcataacggctcttacgattttaccgctgtttcaaccattattttccttgatcggaaaggacgccactttaacaggtcgtatcccgttgtggcggcagatcatccaggttatgatcaaccggcatacatttaccggatatggatatggaatgttctggagggaccgacaggcagttgccatggtccatcaggcattttcacgaaattcttttatgggaagcatgacaacaggcgcccacaatgttttgctggaattgtggatgaatgtaggtctgtttggagttgccgcgtattttacggctatgatcatttccaccataggagcagagcggatggaatggaccgattatctgttcagtgcggcgtatatcctgtggtttatggtatttggctggacagaacgttcaatgtccacttatgaatatcagactttgtttttatttatcgcaatgggatctgcctgcaataaacaaagggtagggccaaagaggagacaatatgttaagtagtttggatatgcgggatgggatgcagttatttctctgcgctgtgatcctgttcggggcttattgcgctgccttaggcgtgatctccggacggatccagaacaggagcgggatagtgcctgcagccatgatccttttatgtatttttggctgtgtaggcgttatgctgttttttgtgttccaggtcactggagaaagcagcattgtgctttttatgcttcttgtgctgttgtctcttttgatcttcggcggagaactgtggtttatcatgcagaatataaggaccttaaataaaggcggctgcgccctgcttctcacctatgtgcttgcagtactggctgtgactcttttatggagaaaagggggaacagacagcagattgcagatgcagctttttacaggcgtaggggaagcgctgcaaaaacacagtttacagcctgtatggcatatgctgcagaatgtagccctgtttgtgccggtgggactgttgtttccgctgatccatcctgcctttgaccatccgggatatgcagtgatgaacggtctcatgctttcggtatggatcgagaccatacagatgatcacagcctccggaacctgtgatgtaaatgatattctgaccaataccctgggaactgccatgggatatgggaccttttggatcggcagggggatgagaaaatgaaagttttaatggtagaccagttcctgccaaacagtgtgtatgtggtagaattgtgcagggaattgagaaaatatgcgaaaataaccatattttgtaaaaagaacgcaggaacggatctggatggggtcatctggaaagataagctgtacgcaggcggaaaaggaaaaatggctgctgtatgggaatatggaaaaggcctgttccgtctgcaaaaagagatcaaaaagggcagctatgatgtagtccacgtacagtcctttaaagacgcaaaatacgagatccccctgtactgtaaaaataaaaaatacattccccgtctggtgcatacagtacacaatctccttccccacgaagcctcagcgggggacagggagctgtacagccgtttttataactgctgtgacctgttggtggtgcataatgaatattgcaggcagcttttgatgaaagagtatcaaattccggaggaaaagatctgtattacccctcatggaagctatacccagatcagaaaagaggaaaatacagattttgggcttacagaccggaagatacggtttttgcagtttggcattttaaggccatataagtccagcggtgtgatgtcaagaaaataaatgattt

SEQ ID NO: 3624 - DNA, 93872 bp, Unknown
  gut microbiota DNA sequence
tcagggttttacatactgtttaatcttcaattatcaaggatctcatttcgttgtcagacttgtttgctgcaacggttatttattataaccggttgtttctcatttgtcaacaacttttttaatttatttttttgtttctttcgaaacatttgctgctctctcaagcgcgaagattataatagcaaatcacaaagcgtttgtcaacaacttttttaataattttaaatttttttaaaagtataaaaagtttaaacaataataaaaagtcaacaataaaaatgccccgaattttaaggacttttcagggcatttcatacatatgatcctctaactcattaatacggcttccagcctactcaaaaaccgtcctctggcaccttcctggtttttaaggctctttaacttatccgtgctcttcgccgggatccatgctttattggtattataataaaaattcagctgcttccagtacttttccggaaacaggaacatatagtaaaggcattttcgctctttcttatccatagggcgaacccgttcataagagtctaacatggatatgccaagatcacagtcccagctgtgtttttccattacttttcgcataagccggtacaggtcttctgcctggactcccaggtgcatgcggttatattcaataatcgctgtgtaaccatttcccataagtacatgatgctggtccaggtcgccgtgacagagatagccctgattttccccggatccttccggcgccagttccgcggcttccagcctgtcagtgatcccgttttctggaaacaggctgttcatctgccttacggcttcttttgcctggtcaaagaaatgatcaaagctgtctattacacaaagttcaaattctgtttttccccgtttgccccggataaaattcctggcacgcttcatttcccttacatggcgttcctgctctttttccaggctttctatacagatcgaccccatattccattcttctcttacagggatctgacgcagctggccatggagcatggcaagccgggaaatcccctgacggatctcatagctgtccctgatattacattccctgtcagaaaaccattctttcataatataacctgttccatccccggctttgcttaaaagagctccttcctggttacgtacatactgatctgcccggagacttcccctggtatccaggcattccaatacctgatcttcaaattccagtctgcgcacagtccccttatattcccgcaaaagcttcagtcccttatcggtttcacagatccaggcgcccctgccttttcgcacagacaggatctccacttcatattgttctaaaacctcctggtatctttcattcattttaaccctcccaccaagttcaaacctctgaccacatttacagttttccatgatcttcacttaaactgtcttttactgcttttacagactatgtagacaaaggcctgattatgcggaagtttttgcccttaaatgtttacagacacaaaaagtccccctgcaaacgcaggaggacaattggttcatttatttctgttcccagccatctttccacttcatgtgatgaagctggccttctaatgccattttttcaaaatcattatggcgcagggcctcgtaaagcaccactgccacggaatttgacaggtttaaggaacggatctcgccccacatagggatgcggacgcagtgatcttcattttccactaagatctcttccgggataccggcgctttcttttccaaacataagatagcagtccggctcgtagtctacttctgagtagactttatgtgcctttgtggtagcaaaatacatttttcccggggcatccgggttcttctccagaaaatcctggtaatcgctgtatacatgtacatctaatttatcccagtaatccagaccggctctttttaaagctttttcatttaacttaaagcccagaggctcgatcaggtggagtctggtgttggtagccacacaggtacggccgatatttcctgtattagagggcatttccggctctaaaagtacaacattcatcataatcttattctgcctttccatcatggcgctttacaaagcgctcaatacggcttaacgcctctttcaggctctttaaggagtacgcataggaaatacgtacaaagccttctccacaggcaccaaaggccgttccaggaactacagctaccttttcttccatcagaagcttggtagcaaattcctcagaagtcataccaaaacggctgatatttgggaatgtatagaatgcgcctaatggctcaaagcagtcgattcccatttcacggaatgcatttaataaaaatctgcggcgctggtcgtaggactcacgcatcatctctacatccggatcaccatttttcagtgcggaaactgctgcatactggctggtggtaggcgcgcacataatagcatactggtggatctttaacatctgctttaagatcaggtctggcgctgccgcatatccaagacgccagccggtcatagcataggacttggaaaaaccgttgatcaggacggtacgctctttcatgcctggaaatgctgcaatagtagcgtgttttctctggtaagtcaattcagaatagatctcgtctgttactacaaacaggtctttttcaatgacgatctttgcgatctcttccagttcatgtttttccataatagcgccggttgggttattagggaatggaaggaccaggatcttagtcttgtcagtgatcttttccagcagcttctcaggagtcagcttaaactggtctttttcctccaattcaatgatcaccggaacaccatctgccagagtaacacatggaagataggaaacataacttggctgtgggatcagtacttcatctcccggatttaacatagcacgcatggcaacgtcgatggcttcacttccgcccactgttaccataatttctgtatccggatcatagcttacttcaaaacgacgctttaagtaattacagatctcatcctttaactgttttaaacctgcattggaagtatagaaggtacggcctttttcaagggagtagatgccttcttccctgatatgccagggagtgtcaaaatccggctcgcctacacctaaggaaatagcgccttccatttcatttacaatatcaaaaaatttacggatcccggagggcgggatacttacgattttgtcagataaggggtttctcatggtgtgatcagcatcctttcatcctggaccggctcactgataatggtgccgtggtccttatattttttcagtacaaagtgggttgctgtacttaatacagactccataggagctaatttgtcagatacaaactgtgctacctggcgcatggtctttccttcgataaatacggtaaagtcaaaagatccgctcatcagatatacagcgtttacttcattatactggtagatgcgctctgcgatcttgtcaaagcccatacctctctgaggagttacttttacttcgatcagggctactactttttcttcactggtgttatcccaattaatgagagtgtggtatccgcagataatgtgctctttttccatctcggcgatctcgttggccactgcgatctcactttcaccaagtaataccgccaggtctttgatatcgatcctgctgttcttttcgatcaccgccagaattttttccctcatgataacttcctccaatattaaaatcacaatattaaaatcatatattcttatatggtattgccgtcaatacggctcagttcatcggctcttggccgctctaaatatccggctgtttcctctccgtggcgtataacacgggcaattcccttttctgtgctgccgatcactgctgcagggatcccctgtgcgctgaggcttcgcaccatctgtccgcctctgtcacaggctaagatcacacagttttcactgaaaagacggtaaggattgacctcaaagatctcacatacttccactactgcctgtttcatagggatcatgcgcagatcaatgtctacgcctacgttataaataccggataaattccatactgccgtgagaataccgccttctcctgcgtattcccaggctgtaaccggacaatttttctgctttaattcattttcaagccactcttttacgttgtagctgtctttttcttccagacatctaaggaaagaaggcgcaaaatgcccttccagtttttccctttttttctggaagatctgtctggttccggcaagaccggcaaaaccagccactaccagatcctgacctggctttataaagccatctcttttttcaaatccgcccggaccctgtcctgctgttctcatggattttcctcctgtgcgggactggccgggctttccgcaccagcattatcccccgcgggctgcgctgcagtggtgggaacaactcccggtccgccattttctcctgtaactgctttatgttccgcctctgtctgagccggttctgtctgggcagtttcaggtgtatgattttctgctgtttcaggtgtagtggcaggtgctgtctgctctggtaccggtgcaggtgccgcatgggccggtcctacacggtaaatggctttggaagcattgtaagtatcctcatttaaaagggtacgctcctgttccactccgtctacggtcactaccttccagagtctggacttatatccggtatgggcagactgtactttcacctttgcacctggtgcaaggctcttatccgtgatcatctgcggctctcctggattagtcgtgcctatggtctctgaaacatattctacctgtctgttagaaggtctggtctcttttccgtagagagtaaaagtcagcttctttccagatgtatatccttcgatatatacaggtgtgctgtaattattcttaattttaatatctttataagtgcctgcaatggctgcatccatagaaggctttacataagttacgatcatggaatggttctgtctctgaacgatctccatttctgcctgcagtgccgcatcatacagtgtagtagcgatctggcagacaccaccgccgatactgtctactacctgaccattttcataggctgccgctgtcttgtagccattttcaagagtaaacggctgaaggcattcgtaaccggagatcacctctcccggcataagcacacgaccgttgatctttcccgcaccaactgcaaggttggtggaacgtgccgcgccgctgctggaaaagtcagtggtacaggttcctaaaacatcttctatggtcttaagatcatcggaagtaatagctggctgttcttctatgatcactgcctggacagagatttcaccattagagtcttttaatccctcaaaagctgtatctaaagcggaagccgtggcatctgcatccacgacttttcctaaaacagactctgtgatcacaaatgcgccgttttctctgcggatagacgcatcctgaggctgtgccagtactccgtcgcaatgggtatctacaaaatctcttatcttatccggatcggctgctgtcttgatggaaacatccactggtgccttttccagatcctttttgttcatatactgacggatcaggcttccgcctacatagctttttagctctttttcagcttcatcctgattgctccagtgaaagcccagctctccggctgtagtctctgcctttttgtcctcaatggttaaggcaacggatgtacccgcctgatctttcactttttcttctgctgtatgcagggcatcttcccaggtttttccagccagactttccccgtctgcgctgataccttcaggaaataccggtgccgcccatgcactcatgggaagcacccataaagccccggcagccagtgctgcaaaaaggcctgcttttaatgtcctgtttcccataaattctcctaatcttttaccgttttaatcagtgctgcatttaagcagcatttaattaatacatcagtgcgctcagtgccattggtacgatcatggcaagtaccagaattacaacgataacagtagaaatgatcttctttactttagggtctctcatatttaacattttatcacctcatttattctgtggcttcacccgtccgtactggaggatgatcttgtcgatcagtctggaagcgtcgctccggcttatatcgtctaactgcacagttatgtctattctatgacattttaataaatcctgcaagtattctttttgccttttcgttgccggttgctgccgcttcatccggcagtttaaaggggttgtcacaaagagttccggctgttcttctccataaagggcaaccagcttctgatacaggaaatgggcggataatgcatcggcctctgcccggtgcgccaggggctgttcgatcttataataggtacaggcatttcccagatttttcttttcctgctccggcattagtttccggcacactttcagtgtatccactgcctcacattcaaattccattttctggttcactgcagcctgttttaagaaactgtagtcaaagcggatgttgtgacctaaaagaggcaggtttccgataaattccagcacttcccctataatatcctcgattacaggagcatcttttaacatgtcatcggtgatgcctgttaattccacgaccctttctgtcagcggccgttttggatttaccagagttacgaaacggcctgtgatctgtccatgctctacttttagagctgcgatctccgttattttttcttttttcggctccagacctgtggtttctaagtccagggcaatgtatgagtcagtcatttcgacgtattcctttctattatgtcagaagttttgtgattttacattttcctgtttaatctattttttctgtttctttgaaaactgccggcacttcacaggcgggacaccactgttttaaaaagcagttcccacagtccggtttcctggctgtacagatcgtccgtcccagtgtgatgatatggatattccagaggatccagtgatcttctggcagcaccttcataaggtccgcttcgatcttttccggctctgtttcttttgtaaggcccaacttcctggaaatacgctttacatgggtatctactacaatacttggcacatggtaaatatttccccggatcacgttggctgttttccggcctacacctgccagtgtaagaagatcctccagtttttccggcacaatgcccccatattcttccaccagccgtttcgcacactggataatgtttttggctttcatatgataaaatccaatggaatggatgtcctgttccagttcttttagatcagccgctgcaaaatcttccagggtcggatatttcttaaaaagatcggctgttacaatattcactctggcgtctgtacactgggcacttaagatcaccgctataagcagctgccatggggtttcgtagtttaaataacagatgaaatcagtgccgtattctttatctaagactgataatatatgagagatccgttcttttaatttttctgtcattttgatcatatttgtttctatccctttatcctaatttcatttcaagtttgcttcacatcttaatttgcattttacaattcaatcgcctgtgtctataataaaggaaaatgtggaaaaggtaaatgttctctcggagtttttctgtgcctgattttgtgagaagattttttgtcagttgttcccaaatttctgaggcgtacgcggtgcgtacgttgaggaaattcggggggcgactgccggaaaatcggccgcaaaagcaggtgcatgaaagactctgagaggacatataatgtttgagaggataaaagaggataaaacatgcagtcaaagaaagatttataccagatcggcgaagtggcccgtctgtttcatttaagcatcagcctgctgcgccattatgacaaaacgggactggtaacgccggagtatacggatccggacactggataccggtattacagcatccgtcagtttgaatgtttaaatacaatacgctacctgcgggccttggacatgccactggaagagatcggggattttcttcacaacagggataccgggcggatccaggagcttttgtcgaagcagctggtacaggtgcataaaaagcagcaggagctgactgtgatggaacatcagataaagaaccgtttaaatcagatccagggggctctttctgcccatccaggagaaatctttttagagaaaaaggcaccgcttaaactggcctgcatgaaaaagcagctaaatccggaaaattatctggatctggagtattccatccgtgaaatggaacagggaaacagccctgcttctattttccttggaaaagtaggagtagggctgttttatgagtctttaaaggcacatcgctttaaaccttatgattttgtttttatcattctggaagaggatgatcctatcaaagggcaggtcattcacatcccggaaagcacctgggccattgtccgttttcatggaagccatgaacaggcgccgggattttttgaaaagcttctggcctattttaaggacgagggatttgcccctgaaagctttgcactggaaatgaccctcatcgactacggactcacccatgaccagtcccagtttatcacagagatacaaattcccttaaacccggactgtccgggcattatagcttaatggatcccgctttttgtagtcaaacagcagataggttccatctcttaatggctctaaatgggccattttggccatctgtctggagtcgtagccttcatagccagacagatgctccggagttttctcttctttctggaaaaattcacggacaaagtctttggaactgcttaaatctcttgcaaaggttgggcggctctttacattttcacgaagatacaggtcggtcattagcaggtcacggtataattctaatttttcagaaatgttaacattttctgccattgcctgagtttcacattttccatttttttccaatctctcctgtattatcttccagaggatctcatatctggcaatgcggctgtggctgataccaaacaaatgatttttgttgtaataacctgccataaaggaaaacatttcataaggagtatcaaattccttttccagttcttttaaagtacaggtaaactgacggctgttgtaatgaacttccgtcatttcttcgatatcttttaattccagcacgtccccataggaaagccatttggtacacagcacctcataaggcggcgcggcactgtaaagcaagtcacagtccgggatcagttcttccatataagagccttttaatacctttaaaaagcctaactgcagctgctccggctccatttcatatacatcattaaaggactttttaaagctttccagatcttcccatggaagtcctgcgatcagatccagatgctggtggatgttgtgccagctgttgatggttgctgtgatctgtcggatctcttcgatatcagtctttcggcggatggtctccagtgttttttcattggtagactggacgccgatctccagctgcaccagtcccgggcgcatggtggaaagcagatccagctcgtccttatctaacaaatccgctgcaatctcaaaatggaaattggtaacgccgttatcatggtccctgatatactgccagatagccattgcatgggactttttacagttaaaggttctgtctacgaattttacctggggcactttcgcctgaaggaaccactccagttccggcagtaccagatccaggctgcgaaaacgcagtttcttatcaatggaagacagacagtaggcacaggaaaaaggacatcctctgctgctttcgtagtagataatgcggtgttccagttctttcatatccataaaagcatagggaaatgggatctggctcatgtccattacctggcgaaaacctgtatctgtaaatgtgccatcagcatttcgcaccataagaccgggaacctgttttaaatcttctccttcaaggagtgcctttagaaaatgggcgaaggtgatctctccttcccccatcataacaaggtccactgccggttcttctttcaaaaaggcttccccatgataggaaacttccgggcctcctgcccatattttcacatctggaagcaccttttttatgtcagccagtatcactttcacataggaaatgttccagatataacaggaaaatccaatgacatccggcttacgcttataaatatcctgaaggatctgctccatctggtggttaatggtgtattctgccagagagatctccgcctgctctgccagtccccattcttttaacatcttctccccataagttttcaggctgtagatgcccagattggagtggatatattttgcattgatcgcggctaaaagaaccttcattttacacctcgatctcgatcttgcggccggtaggctggtactgataataacggacgcctgctgcatttaacatgcgcttggatgcttttacagccggtgtatgggcgtacttgtccccgccatagataatggtcttaatacccgcctggataatggccttggcgcactcattacacgggaaaagagttacatacaatttgcttccttccagacttccccctctgtaatttaaaatggcatttaactcgctgtgggtggaatagaaatattttgcattgtacggatcgtccagttcatgttccttgccccatggaaattcatcatcggagcatccctttgggaagccattgtagcccatggaaaggatcttgttatcctggcttacgatgcatgcccccacctgggtgcttgggtctttggaacgtctgccggaaagagtggcaactcccataaaatattcatcccatgtaatataatcaacacgtttatctgacattgtatttctccttcttgcatcaatttcaactatgataccggattgctgcgtgcttcgcactctcgcaattcttaaaaatatttataattatcatataatagacgaccttaaaatgcaagaaggagcagccggatcagctgctcctgtgtatagaattactgctattcctgcattacactgcaggtaatgtaacgaccgctatttatgccttagccacattcttggtcacgatcacgtctgcatccagacctactattcccttgatcacaacggtacctgctttcacaggcactttcaggcggcattttttgatctcatccattgcatcgaaaatacgcgccttggggatcggggcagtaaggcgtacactggcaagaggcagttctcctccttctaccagtacggaggttgcaatgtttctcttcggatctgtcagctcctgttttacatactctgctcctcttttgcaggtggcgccctctaatgaatggatcactacggactgatctgcctgtatctcataatctgcgcttatttcacagccatttggacaaatgatgcatgtaaattctcttgtcattctaccttcacctccagatctcctttattttccagtttttctgcttttaaatgtatatggatcatctctgccggaagggcttttttcatctttttgcgggcaatttcttttccattctggcttacaactaaaacacagtccttaaatggccggttcacacgcagggacagacaacagtcttctgttccggagatcctctgtggaaccgtatgattgatatttttatcagtctttacctggatctcacatgcaggcagttttccctctttgatataccgggctgcggagtctgccagcttttctgcttccatggatacaaaatccaccagatcgtgcacatgaaggacatttcctgctgcgaaaattcccggccggtccgtctggaaatattcatctactgtagcgccttttgtccttgcatccagtgttactcctgcatccagggaaagttcattttccgggatcagaccaacagataagatcagtgtatcacagctgtattcctcttccgttcccgggatcggcctcatatgttcatctacttttgaaacagttacgccggtcagacgcttatctccgtggatctctgtcactgtatggcttaaatacaatgggatattgtaatcatttaagcactgctcaatattccttggaaggccgcttggatatggctggatctcaaaaactgcctttacatgggcaccttccaaggtcagtctgcgggccatgatcattccaatatcaccggaacctaagatcaccacttcttttgcaggcatacggttataaaggttcatatatgcctgggcaactcctgctgtaaacactccagttggccgctctcctggtatgccaagtgcccctctggtgcgctcccgacatcccattgccaggatcacagctttggctttccactgtttcagaccatcaggagtggctgctgtgatcactttatcctctgaaatctccagaacagttgcatcagtaagataacggatcttcttttcgtttgccaggtcaatgaatttctgggcatattccggtccgctgagtgtagttttaaaacgggccagtccaaaaccatcatggatacactgacgtaaaatgccgcctaactgtttttcacgttccaggatcagaatatctgtgatcccgttttcatacaggcgtacagccgctgccagacctgccgggccgccgcctacgatcactgcatctgcccgttctatttcccacatttctgttttatgttccatgttcacagtcacacctcccgtacctttccaaataagacattagaaccttcccgctcatactgcacttctgtctcttttttgccaagttcctgttcgatcagctgttcaatacgcatctggcagtagcccccctgacaccgtcccatcatggatcgggtcctgtatttcacacctgtcatagtatctacgcctaatggattgtgaattgcctgaaggatctctgcttttgtcaccttttcgcagcggcagatcacttcgccgtaatccgggttctctttgatcagctctgcctgctcttctttggtgcactgggcgaaatggcggattccttttctcaccgggttgaaatccggattttcctctaatgtttctctttccttcatcagttcaatggcgtatctggcaatgggcactgctgctgtcagtcccggtgactcgatacctaccaggtttaatgcatgaggcgcgatctcgtctttgatctcgatcttaaaatcctggatcacacccttttcatctacccattttggaaggataccagaataattgcggatataatctgccttatggatacatggccacaggtcagaagcactttctgccagataatccatatttttctgaggcacaccgtaataagtaaaatctgttaccatatctgcgttagggccgatgatcacatttccgtctgtggtatttgtcacatgaattcccatataggtgttgcttggaaccggataaacaggcataggaagaagcggtccggtgcgcttatccaggataatataatctcccttggaaccgatgatgcggtagccggtgatccccagcatatcagagatcttgccgcagccaaggcctgcgcagtttactacccagcgggtcttaaagtttcccttggttgtggttatttcataagtatcatcatcttctctccggattgcagtcacttcacagccaaaatgatactccacaccgtttgcatgggcattttctgccagggcaatggtatagccaaagggatctacgataccgctgttatgggaaaacatggcaaattttcctactactgcaggaaccagctcatgaaggcgtttttcatcgatcagctccaggttagtagctccgttgtcttttccctgctccatggtacgctttaaggtctccatatcttcctcggtatttcctaccagcaccttaccgcagcggataaaatggaaatccagctcttttgccagatctcccatcatcttatttccttctacacaaagttttgcctttaagcttcctctgtcataggcgaaaccaccgtggacaacaccggaatttcgaccgctggtctcattgcatacgtccagatttttctccagcacaccgatctttaaacggtaccgggacatttctctggccatggcacttcccactacgccaccaccgatgatcagaacatcatacatctccttcattttcctgcctcctgtgttcagcattttattttgctttaaattcatcccatgaatatattttatatttatcatatatgacaatataagtcaatgtatttctgattttctttgtaaatttataggataaattcaatctatagtcaacaaatggatctctgatacgttctcagtatatattgcagcaaaaaagcagccattacccatttttgagtaaggctgcttcttgctgatattttcgctgaattttacttttaaagataaatttgacggatcacaggtattattctgtaaccagagctgctgctacatctttgtcctttgcaccgtctttgatgatgaacagttcgttggtatcaaaaccagcgtccttcataacagcgattgctgtctttgcacacttgttaccgctgtagcagagaatgtatacaggcttggaagagtccatggtctgtgccagttcgtacattgccttctgtgcatctgcgctctcaaaatcttttaatccgcactgcagggatccctttaaatgtccctgtgcataggtgtcatcatcacgtacatctaagaactgaacgtcatcgctgcctactgctgcaactgcgtctttgccatctacatactgccagtcaatgtcttcttctgtacggtttccgccgaaagttacctctgctgcctcagactcttctgcctttgactctgctgctgtggtctcagctgatgtagtctcagctgctgttgttgctgctgtggtctgtgtagacgcagaattaccgcatcctgttgacataacgactgctgccgctgctgctaaaaataaaactctccactgcttcttcataataaagttcctccttgtgaataaaaaaatatatttatttatagtttaaaaccggttccagatgttctcgatccggcttaaaaactcatcagaaagatatacttccagtttatcaaaggtcgactggttgaatatttctttatctggctgctgatactgtacccatgccatagcacaccaggtgatcccacgcaggcaggtgaccggaatataaatgtaagtccgtttctttaagcctgtggtatcaaagcggccatttactttttctatatatgtatctaaaaaggcatccatctgctcctgatccaggatcacatctgttttccagaaagtagttgtaggtgccaggaaatgtcccagatcctgggccggatctccatataatggcttttcccaatctaccagatacgcctctttttcattatcatctctgtcattaacaagaaaattggtagaatttaactctgtattgatacagcagtgataaggaatatctgactttaaacttttcactgccttccacccctgatccagcaagctgcggatcctgcgctttttctgctcatcccccaggtctgactccatataggtctttaccatggcctcacactcttccagtatggcttttaaaggttcttctggccggaccagggaatgggcttccggcatttttacactgtgtatatccgccagacagcctgcagctgacaacagttctgttttataatccagactgtgtccaggcagaaattccatgaccatgacaccatagggaagatattggcagcttccgtctgcataaatggcttttggcgtacgcccggaattttccaacagcttcaatgccttgtattcataaaggatctggtcttttaaatgcatctggctgccaaaattgatcctcaataccagcttttttccagttatgggatgaataaaggtataattgcggttgtattctccctgagccagcatggtatagttttctgtcacctgtccaggcagtcccattctctcccggtactcttttgtttgaacgtattcttttaatccttttgtccgtttcatgacctgaagctcacctaccttacatcccggtataaccggtcgatcttctctatgggaacatgatcccggtacattttccttaaccggttcattttccacattaattttaatttaggtatcgtaccttttggaaaacggcggtccgatgtatagatccgcctttttgccattcccagccgtactcccatttcttttaatgtcaatgaaaactgataatcttccatgaccggaatcaccgggaattttcccgcctgaaaaaacagctccctgtcaatgaatattccctgatctccaaacatcaccttccggtcttttatcctatgattggaaatgacccgacaggtaaacataaagaaattcctggaatgaaaggcgatcccaaaacagcccgcgctgtggtctttcatcacccggcagatctcttctaatggccctggcggcagttcactgtcgcagtggagaaaaagcaggatatctccatggcttttctctgcccccaggttcatctgattggcccgccccttttcagaaagaagcaatttaaaatccggcccgaccattttcggtgttccgtctgtgcttcctccgtctacaaaaaggatctcacactgggagcggtaaggatacagctgctttttcatagcttctatggtctttgcctcgttgtagaccggaatgatcacagatattttaacatttgcagccagataccggcctgtatgactgtgctgaagccgtttgtcctgacgcatccgctgtctgtaacatcgaagatcctccggcgtatccatgtcctgatgtttcgttgtaaatccaacatttattcctgcatctgaaagttcttttaaagtatcttcaaacacatggctgtgaccatattgctttaagccaaaggcctcaggtatgggccgcttcataccaaccagataatagccgccgtctgccgttcttccaaaaacagcgtctttttctttcaatacctgaaaagccttttccagatccgggctgctgacttctggaatatctgtccccataagaaggcaaacgtcatatcccagccccagaacatattccagactgtgatacatcctctgccccagggactctcctgtctgggggaaatattctttctgctttcccaggatatcctgaagctccttcacatccccgttttcaggtgcatagcacacaaaacaatctgcttttactttcctgcactgttcactgatatctttcagaaaacaggtatgcagcttcgcacactgctttggtgaaaaataaggcatcagccgggttttcgtctttcctggtactgggatccttgtaaataggatcagcgcctgtttcatttaaaccagctcctctaaaatagacagcacatcaatgacaatctgtggacagagatcaaacataaggcctttttctaacactttatccatttcatctggctttgaaatatcgtgtcccaggatctcacggcacatatcggaaggatatttttccagaaaacgcttcttaaattcagccacttttcctgccatgatgcctttctggtcaccgtcattttcttcactgtgtccaaataccattccaagaactattaacgcgccggtcacagcgccgcaggtctccccgcacatcattccgcccccgaaacaggctgacattttccttgcctgttctttggtcattcccattttttctgcacatgcgccggtcactacctgagaacagtcaataccggccataaacaactgacagacttcttcttttgtcatgttcttatcctcttttctttttcatatgttccatatggatgctgcgcatcataaagatcagcgcggacagggcaaaaatgatgagaagccctgtaacaaataacttagctccgccggtaagcatgccgcctacataagaataaacaatggttgcaggcagctgtccgatcccagtggcaataaagaaggaggaaaaggacatagatgtaagtcctgctgcgtagcttacaatatcaaaagatacaaaaggcagcagacggcagatcaggatcgtattttttccgtatttttcaaaaaatgtatcgatctgtgccagaccggaacggctggtcagcttttcagccacatcacgacctaagattcttgcaatgtagaaacagattgctgcgcctgccatagcactggaccaggataaaatagctcccttccaccagccaaataagtttgcattggcaaaggtaataagaaatgcaggcaatggcgcgataatggactgcaggatcattaacagaaaagataatgccgctgcataggctccataggacgctacaaaatcgcgaagcacggtaaaatcaccggttgcaaacatggcaaaaacacaattcatgccctggtgtacggacggtactgccatgtatacagctatagctgctaccacgcaaacgatcaggatcaccttttcgatccatttatttttattcttcttcatactttctccctcttctatcttcctgcacgaacccggttccacagagaatgccttacatccggcacttcttctcttccaaggatctgtaccagcagatgttttatattttttccgccggctcttgtgagatttccggcacaggaggcacaatacacgcttgtattctgtatactgcctgctgattttgccatctgagctgcaagttccggttctttcaatgctgcgcagcctccaagaccacagcaatttgcgctggaaaggatcttcggttctgctgtcagaaatgaccgtatctgttttaaaagttctctcttttcacgttccggacatggaaggaaaatattctgctcttccatgatcctgtttcccagccccagttcctgtaatttttcgtaaatactgatcaccggaacagaaagtttgtctttcaaaaaagcataacagtttggacagaccataaccacttctcttacccccgcttccaggagctttttatttaagcgttccaggatcactgtttctttttcttccagtcccagctcggctatcggcttcccacagcagtcaaatacagaaaatgcatctgctttttctgccagcagtttccccagataacgggtagtctccggataaaaagaaggaaagttacagccgaaaaacaatgctgtttttcccgttcctgtgtatctgcgaaatttataatcttctttctcccacaggagcatcccataacccttttcaggtatcctgccgcctgcttcttttacccggtgtcttcggatttggagtactatttcccgtccatcaatcccctggggacagactttggaacattttccacagaggaaacagtgatatgccatcttggaaagtttttctgtatctccgatggttaggtcatatttctttaaaaactcacagttttctgtgcatacgccgcagtgggtacagcctgtgaccgactctttcatcacatctcatctccatttttcagatccgttttttcctgttctgcaaggacttttttctttaacaggacacctgctgttgttactgccaccgctaatatagcggccccaaggaaacaggcttttcttatacttggatctgccagacctgctgttccaaatgtatacatggcagttcccggaagcataaaaagaaaagttccaaccgcataggttttaagtggcatgtctgttaccccataggcaaagttttgcagattatagggaaacaaaggaaccagccgggtgatcatcaggatccagatctgttttttccctgtttcatcaaacagtaagcggcgcagatatggattttttctggcagctgcccctactgtatctttcagaaaatatctgcctaagagaaaagctgcaactgctcccaaagtagctgcaactgtacagcagatcgtccccaacaccggaccaaacagcagtcccgcaaggattgcaaaactgatccccggcaaagcgaaagctacacttcccactgcggtaaccaccagatatatgaaaatggcagcaggcagattttctactgttatatgctgtaatgcctgggtaagatccccatttaacagccgcccggaccagccagaatattttccaatcaggaacagtaagatcatccctactgcaaatacatatatttttcttttacctgctttttgtttctgcactgtatttctcctgtatacaacgtacaactattttaccattaattcccattaatgtcctattgatatatttggtgaatatatgctatttattgatattttctataaatatatttataatcaaacaacaaaaaacgcgccattggcgcgctttttctatacatggtcatctcttattcttttctgtaccggttgtggttatacatcaaatgaaaatacatttcctgtcttgcatcttctccccgtccatcacggatggcttcaaaaatgcgcctgtgggacaataaagtctgctcatattctgtttcttccacagagtccgcaaaaacacgtactccctctgtgatcaccgggatcagattggtcataacacggttgtgggaacaggttgcgatctgggcatggaactgggagtctttttcggaataatcctttttatcccggatcagtccttccagttcttttaaaatgtattccagttctttgatttcttcttctgaaccattctgggctgcaagcgctgcaagtgccggttccaggatcagtcttgcctggagcagatcttcggtcagctggcgtctgtcatccatcataaagaagcctaacggatcatctgccaccccgtttttgtcggaaataaaggttcctgagccctgacggatggtaacgatattccgggacataaggatacgcagggcctcccgcactgtgtttcgcccgacccccagtgtttccaccagttccgcctctgtaggcagtttatctcccgctccgtaacctttctcctggatcatttccaaaaggttctgggctgttttttctgctaaggtctgtttttctgtatatttcatttccatagatcctgtttttctttcttctcagactttatagatctggtatccggctgctttggacagacggttcataatggcctgtcctaaatgatcctgactgaagctttcggaataaatatagtctacttttaaatcatcaaattcacgaaggagggcatacaggttatgggctacagatgcctggctctttctggcaccgatgctgcgtacctccccctccggataatgggatcttgactcatcggtacagatgatgcctactttgtatcctgcatctattttttcttttgccagtttccacacagtttccaccatagcgtttacctgctcctgtgtcatggcaacggcttcccctgtttttctggcttctgccacatttgcaggttccaccagagtcagatctgcctttggagcataatgtttatatttcatgcctggtgcttttgggcggacaccagctgccatcggtcctaagatagccgggtcaatggtcacttcccctaaaacatcttttaacatttccatggtaatagcacctggacgtaaaactgcaggaacatcaccggagacatctacaatcgtagactccacaccgatcccaacaggaccaccgtcaatgatcatctcaatcttgccgtttaaatcctgccatacatgatcagcagtagtagggcttggacggccggaagtattggcgcttggcgctgctaccggcacaccagccagtgcgatcagacggtttgcaaccggatcaactggcatacgcactgctactgtatccagtccacctgtggttccataaggtacaatatcactctttgggaagataatggtcaacggacctggccagaacgcatccattaatttctttcctgcttccgggatatattttaccagtggtgtaacttccgctgcacaggatacgtgagcgatcagagggttgtcggaaggtctgccttttgcagcgtagatctttcctgccgctttctcatccaaggcatttccccctaaaccatatacagtttctgttggaaatgcaacaagacctccgtcacgtaagatctgggcagcttcttttaattcttcatcatttatatttttggtatcacttattttaattcgtttggtttccatagtgaatttctccgtttatgtgtgctttttgcttatagactcaggttccctgcgctgacgcaggcaaaacccaccttcagagtatagcatatttccaaaagaaaaaacagtcgtgagaacactaacattctcacgactgcctaaaatcagcctgaagccttttattttaaatcttttatttccctacagttccaatacggactaacgcacggtgaagctttgcttctgccagctttacttctttgtcatccataccggactggctcagtttatcttctgccctcttttttgcttcttcagcacgggctacgtcgatgtcttcgctccactcccaggtagttgggatcagacggcattcgccgttcatcatggtcagcattccgccgatgcaggctgctttcctttctgttccgtcctctaatactacatgggctgttcccattccaatggccgtgcagtaattcatatggcgggccagaatggcaaggtctccgtggatggtacggcaggatacgctctgtacctggccgtcaaatacatttccgtccatggtcgcgatctgtaaatggaaggtcgtcatatacctgttcctcccttctactgctgctgttttgctttttcgtatacatcatcaatggtgcccgcaaacaggaagcagctctccgggatgtcatcgcattcgccgtctaagatcttcttaaatccgcggatagtctctttcagtggcacgtactggcctttcatacctgtgaactgctctgctacggagaagctctgggataaaaatctctgtaccttacgtgctctggatacggtcagcttatcttcttcagaaagttcgtccatacccatgatggcgatgatatcctgcagttccttataacgctgcagcactctctgtacggaacgtgctacctgataatgctcttcgcctactgtctcaggggacaggatacggctggtagaatccagaggatctactgcagggtaaataccctggctggcaatatcacgggaaagtacggtggttgcatccagatgggtgaatgtggttgcaggagccgggtcagttaagtcatccgcaggtacatatacagcctgtacggatgtgatggatcccttcttggtagaagtgatacgctcctgtaaagcacccatttctgttgccagtgttggctggtaacctactgcggaaggcatacggccaaggagcgcggaaacctcagaaccagcctgggtgaaacggaagatgttatcaatgaacagaagcacgtcctgatttttaacatcacggaagtactctgccatggtaaggcctgaaagggcaactctcatacgtgcgcccggcggctcgttcatctgaccatatactaaggcagttttatcgataacgccgctttcctgcatttctccgtaaaggtcgtttccttcacgggtacgctctcctacaccggtgaatacggacagaccgccgtgtgcagttgctacgttgtggatcagctccatgataaggactgtcttacctacacctgcacctccgaacagaccgatcttaccaccctttgcataagggcagatcaggtctacgaccttgatacctgtttccaggatctcagttgcaggtgtctgctcttcgtaagacggagcctggcggtggatcgcccagcgctcttttgcttccggagcaggtttattgtctacaggatcgcctaacaggttaaatacacgtcccaggcactcatcgcctacaggtacggtaatagggcttcctgtatctactgcgtctgtaccacgcacaagtccatctgtagaactcatggcgatgcagcgcactacgtcatcaccgatctgctgcgcaacttctgcgatcagcttatgaccgttgatgtcgatctcaatcgcgttcagcagtgcaggcagttccccttccttgtaccggatatccagtaccggtccggtaacctgcaccacctttccaatgtgtttctctgtcatatatctatctcctctttaaggctcctctgcaccagctacgatctcagtgatctcctgggttatgctggcctgacgggcacggttgtaatacaggctgagctgttcgatcatctctcctgcattcttggatgcggcatccattgctgtccttcgcgctgccagctcactggcaacagactcgcacatggcaccatataccataccagccagatactccggcacgatggcgtcaaacaccgtttcgctgtccggctcatataagatcagggaatggatctgtttcatatccttttcttcccctgaaaggtcttctaacggaagcatggatgatacacccggcttctgggaaagcatggagacaaagttggtatagccaagggctgcatgaccgaattcaccggccttgaatgccctgcacagtaaggctgcgatctcaaagcagtcagatacagagatatctcctgcctctgcgaagtcttccgttaccagctgtatgcccctgcgcttgtagtattccactgctttctttccgattggaagtacgcagtagtctttcccggcagtttcgctctccatttccttaaacaggttggaattgtatccacctgccagtcctctgtcaccggcgatcactacatagcaccatttttcacttttgctcttctttgtatacacggaagaaaggtctgtgttgcctgcagcgatctgtttcagtgtgttttccagagtgtggaaataaggccggcttgcgtctgcccgttcctttgccttacgcagcttggaggatgccaccagttccattgctttggtgatctgcatggtgctctgtatgctcttcatacggagcttcacggctttcatatttgcagccatgtgttccctccttataattcatatcatcagcccccgcgcccccaaaatgaaggcagcaggggacccgatatcactcttatctggtctttaagaaccggtcggtatagtcagctaaagcagcttttaacttctcttctgtctcgccttccagttttccggtggtacggataccttccatagcagctacgccctgtgcgtcactgtcaaggaatgtataaagtccttcttcatatgcctggatatcttctactgcaacatcagtcaggacaccctttacaacggcatacaggatagcaacctgcttctctacaggtacaggtgtacttcttccctgctttaagacttccacgatacgtgcaccctgtgccagacgtgccttggtatctgcatccaggtcagaaccgaactgtgcgaagctctgtaactctctgtactgggagtataccagtttcagggttccggcaaccttcttcattgccttgatctgtgcgttaccaccaactcgtgatacggagatacccgggtttacagctggcatgataccagagtggaacagctctgtctccaggaagatctgtccgtcggtaatggaaataacgttggtagggatgtatgcagatacgtcacctgcctgtgtctcgatgatcggaagggctgtaagggaaccgcctcccttttcatcagaaagctttgctgcacgctccagtaaacgggagtgcaggtagaatacgtcaccaggataagcctcacggcccggtggacggcggatcagaagggaaagtgcacggtatgcaaccgcatgcttacttaagtcatcatagatgatcagtacgtgttttcccttgttcataaagtactcgcccattgcacagcctgagtaaggtgcaatgtactgtaatgggcttgtctcagatgcagttgcagcaacaacgatggtataatccatagcgccgcctgcctgcagttcagctaccaggctggcaacagtagaacgtttctgtccgatagcaacataaatacagataacgtctttgcccttctggtttaaaatggtatcagtagcgatggtggtcttaccagtctgacggtcgccgatgatcagctctcgctgtcctctaccgattgggatcatggagtcgattgccttgataccagtctgtaatggttctttaaccggctgtctgtcgcagatgccgggtgccggtgattctaccggtctgtattcggttgtctcaatagggcctgcgccatcgattggctggccgatcgcatttacaacacgtccgatcattgcctcgcctacaggtacgcttactacttttcctgtacgcttaacagtctgtccttcactgatcccctgatcagaaccgaacagaacgacggaaacgctgttttcttccaggttctgagccattccgaaggtgccatcttcaaactccagcagctctcctgacatacagttggtcaggccgcttactctggcaataccatcacctacgatcagaacggttcctgtttcgctctgctcaatagcattctggtaatatttgatctggcttcggatgactttggatatctcttccggttttaattgcattccattcacatcctttatacgatgatttccgtaacttttttcttcagacttgacagacgctcctgtacggtgccgtcaagctgctttccttctaactccacacggataccgccaagtacggtgctgtccgttttctgtgtaagaaggacggtcttgccgctgattttttccagtctttcttttaatgcctgtgcctgtgcttctgtaagggctactgctgtagtgaccactgcttccgcaatgttgtggtcctcgttgtagcgcgccttaaactgtctgcagctgtcacggtattcccgcagcataccgctttcgcataacagctttaagaagtttaacagatacagggaaagctgtccttcaaaagccttgtccaacagcccgacacgttctgttttcgggatggacggctcagaaagcagggtcaggtaatccgggttctccttaaagagaactgccacctgttccatctgcggaaggatctcttccgtcagcttttcctctgcggcaaggtcatagagactgtccccgtagatctttgcggtcttggtcatgatgcctcacctacattctcaataaactcgtcgatcagcttcttatggtcttcttctgagatctcgcgttcaattaccttgccagcaatatccatggcaatgccaccgatctcatttttaatgtcattaactgctttcttcttctcctgggcaatatcagcctcagcttttgccttaattccggctgcctgtgtctgagcttcctggatcatggcttcactgcgtgctgcagcgtccttctgggcattctggagaatggaatttgcagtttcttttgcttttgccatttcagcctcataatcagccttcatggcatccgcttcttcctttgcctttttcgcatcctggatctgagagtctgctaatgctcttctcttctcgatgatcgcgcatacaggcttgaacaagaacttcttgatcagccagcactgaatgaacaggttgcagatctgggcaatgaaagtccacggtatgatcgttactaaatcctgtgtttcccgcatctttctaccctcctgtctgtggaaaccgccttctgtttttcagaagtcttcacatattatatgcagactttgaaacagtaagtgtttctgtaaaaattaggacaggtagttcatgaaagtaccaggtgctacgaagatcagcagcagaccggtaacgaaaccgtaaataccagtagtctctgcgatcgcacaaccaagtaacattgtactggttacatcgcccttgcactctggctggcgtccgattgcttccagtgcctttgcaactgcgttaccttcaccaataccaggtccgatacctgcgatcagagcagcaccagcgccgatagcacaacctgctaaagcaataccttttgctaataactgaaaatctgtcataataaatttcctcctagaataatgtgaataatatctttgataagattttcctactgcgtgtttttttaaccttctgccgcatttgcaatatacatgatcgtcagcatactgaaaatgaatgcctgcatgaaaccggagaaccagtcaaagtagacagacagaatagccggaacacccacatcaaggaatgggatgcttcctaagacctgtccaagcgcacctggcagccagccaagaagcgctgatgttgctaccgccaaagctgcatagatcagcccgttgataacaacgccagaaagaatatttccaaagtgacggcacgccatacttaccggtgttgccagctcagacagaacattgaaaggtgtcatgactgggatcggggtggtaaatccctttaagtatcccaggatgccgcctgccttgatcttattggaagtgatcataatgaacactaccactgcccaggctgcttctgtggaaagatcagccgtcgggcttctaagaccggtaaggctgataagattggaaactacactggtcgtaaacaaagctgccacaaatgggatcagattatcaaactttgttccgccggtattatttcttacgaacttctgtgcctgttctaccagcatctcggccactgcctgccgtttggatatattctctaccttcaggtccctggtgagccagatacacagtcccgtaataagtatcattacgatccagctgactaccagtgtttcggatatcaggaaatcgccaaggatgggtatccctgtaggaatcctgaaataaaccgcagcacctgaaatattaaaattcatatccgcattttcatctcctttcttataaatttggctttgcttttattattcccagaatgttaataagcttaatgctcagactggggaaaaacagcggtataatgcccgccgcagcattaacaaatggtaataccattgccagaacgatccataacaactgggccatggaacgatatctgtaacttattttcatacttttgtaggcctgttcatcactctgttccccggatgcgatcttctgcaccgtaagtcccataataaaaaagtttcctacagaaacagctgcaccaatgacaccgccaagaactaccttgtaatcaaatggtactgcatctggaaaaagtttatggcagactgcaaaagcaacgatcataaggatcgtacctgcaccactccagcatgcgatatgtcctgtttccttctttactgccggttggatcttcatatttctacctccctgctgcacacatatgtgtcttcagatcatacatgcctgttaaaggctttctcatgttctctgttttttttcttcttctgtgttttcataatggcaagatataatttatatgccgtcataaaggaacccccaagtcccatgataaaaccagggatgtagatccacccgcctatcataaaacggctgttaagccagctgcataaaaaaagacacagcagcagcggagccgctaaggagatccccatctggctgagtagtgaaagatttttcaaaatatactgccagtctttcatggaccatcttcctttccttgtcaatagtatatcaaacacctgggtgttttttgttgtttttttataaatacaatcgtgaaataccgaaattatccccttgaattttgtacaacttgaatagattatactcgatattctataaataagcaatggcattttttgcattgtttgcaattttttttagacattctaactttttttgtttgttttgtcttaacaattctctaacggacgttacgtttttcacaaactcttcgttttctttttgacaatttttcccaatatccgctctatccccgatttccaggcctttctccttgcccgcagattataattatgttacaattctccatactatattttaactaggagggtttttatttatggaaatcatcaaattaattggtgtacttatagtcgtgatcggctttatccttaaattagatactctggctgtagtcgttgtggcaggtcttgccaccggactggttgcaggcatgagtcctatggatatcctgaacacactgggcaccgcatttatcaccaaccgtactgccacccttttcatccttacactgccggtgatcggactgtgtgagcgaaatggcttaaaagataaggcagtggactttatccgttctttaaagaacatgaccacaggaaagctgatcgccatctggcaggtgatccgtacctttgcctctgctttctccctgcgtatcggcggccatcctcagtttatccgcccgctgatcaatcctatggcccaggcggcagcagttgtacagtataaggaactggatgagaaatccgaagaccagatcaagggaatgtgcgccggaagcgaaaactatggcaacttctttgcacagaactgtttcatgggatcttccggaacacttctgatcgtatccaccttaagcgaacagggctatcctgtagacgcactccagatcgcaggccagtctgttccgatcgccgtgatttctgctgtagtaggcgtgatctacgccctgatctttgaccagatcttaaaacgccgtctggcatccaaagctgcaaaggaggataaataatatgacctggaacataagcaccattgttgcggaagttttctactgcatcatcggacttatctttatcgcaacgggtatgaaggctttaaaagatgaaagctgtgctcacagaactacaactgctcttttctggttcatccttgcatttacctttattgcaggaccttatcttccaaaatggatcacaggtctgtgcgttgtatttttagccatccttactgcatttaaacgtgtagccccaagcaaaagcgatatgccaaaagaggcagaaacccgtgctgctgctgacagactgggctacagcgtatttatcccaccgctggtactggctgtcagcgctgttttagttgctactttcttaaaggtacttggtgccaataatgctatcggtatctccggctccatcgccctggtcactgcttttatctttttcaggccaaaggctgtttatgcggtaaaagactgtacccgtcttactgacaatgtaggtgttaccggtatccttcctcaggttttagcagcacttggctctgtatttacagctgccggtgttggcgatgtgatcgcagggggcgtaagtgccattatcccggccggaaatctgtttgcagctactgccgtttactgtatcgcaatggctttatttaccatgatcatgggtaatggttttgccgctttctctgttatcactgtaggtatcggtatcccattcctcatcgcacagggcgctgacccggtggttgtaggggctctcggcctgactgctggctactgcggtactttaatgactcctatggcagctaactttaacattctgcctgcagctcttcttgaaacaaagaacaaatacattgttatcttaagccagctgccggttgcactggtaatgctcgctgttcacattgtattaatgtatactctggcatttcgttaaaatattgttcttttttgtatacaatgcataaactatatctaatatttaacgaagtttaccgggtaaatctcaaaatattttgggatattttgggaaataattttcaacaatttttcagaaaggatgatatactatgaaacttcttctcactgcatttgatccatttggcggagagcctgtcaaccctgctttagaggctgtaaaactggtttccgataccgttggatctgtccaggtagtaaaactggaagtacctactgttttcggcaaatccattgataaagtagcaaaagctattgaggcagaaagaccggacgctgttctctgtataggacaggccggaggccgctttgacctgacaccggagcgtgttgccatcaacttagatgacgcccgcatcaaagacaacgaaggcaatcagcctattgatgtgacgatctttgaagacggtgctcctgcttattttgctactcttccaattaaggctatggtacagaatatgcgaaatgccggacttcctgccagcgtttccaacactgcaggaacctttgtatgcaaccacctgatgtatggtgttctctacactctggctaagaactatccgggagtccgtggcggcttcatgcacgttccatttatcccaagccaggtcgtaaaccgcccggctgcaccatccatgaatttacaggatattgcaagaggtattgaggctgccatcgctgctattggtgaaaatgagagcgatattgtagctgctgagggtgctacacactaagcaaagcaacaaaaagctccccgcccaaaatcattgggttgggagctttttactattcttctactgttcatgcattcatatgaccatatgcagccgacatgcctgcttgtccgcttctgttatttatccaggccaacatccatactaccggaacggaagccttccagatccatggtaatataaacaaaaccaagattctttaatgtctttacaatctcatctccatgctctaacagttttccaaatgaagtcttatctgcttcaatacgcactacatttccatgaagacgcaggcgcacatttccgcctaacagctctcttaaataaccttcgcctacttcgatctgcttcattacatcatagtcgatgggagtgttatacggcagtctggttgccatacatggggttgaagggcgggatgctacggaaatgccccactcttttgccatggcctttacctctgccttggtaatgtgcagttctgccaatggactgacgattcccagctcttttaatgcctggatgcccgggcggtatacatggtggtcatcttcattggttccatccataacagtctctgcaccaaggctttttgccatttcctttaaatttacaaacagatgctttttgcacagataacaccggttcaccgggttcattcggatggcttcctgttccagttcatttacatggatcactttgtggacaccgcccagttctgctgccacgcggtttgcaatctccagatcacaggatggatgcagtcggctgtcaaaggtaactgcataaaccttgctgccatccttcgtagctgcctttactgctgcctttaagatcaggctgctgtccacaccgccggaaaaagccacgcaaaggtctttgccgccagctgtgtactttcccatcagtgcttctaactgttccagtctttcttttactgaataattctgtccttccatcgttccggtctcctttactgtatgtcttgtaatgaatgtttgtcttccccggttatctgtttttgctgcgcccctgtttgtatctcctgttagcagttttcatttgcatgtagcgttttcatctgatactgttggttgataactttataactgctctttcgccgcttttgctgctgcctggtaaaccgtgttaaaatcagccttttcctgtttatcacataatgcagaaacactgtcatattccggatagcagtaattctttcccttatagctgcaaacctttacatccgctgttccataggctgtttctacctggatctttctgcggtctaaggcagtgcgctctgccgggaaacgacgaatgccaatggatgtggtatgggtaaagataatgtcttccataacctcacggttgctttcacggcataatacagaaagcatataagccgggcggttcttcttcatatagattggtgtataccatacgtcatttgctccggcctttaacagcaggttcatggtatatcccagtgcttctcctatgcagtcatctaaattggtctctaacagctctaagccgtctgttttttcttcttcctcttcctcaatgagcatggcacgaaggatgtttgcatggtcaaaatccttatttccggcaccaataccgatctttacgatgcgatagttctttggcatggaagcaccggtgctcagtgctgctgcgatcgccgcgccggtaggtgtgaccatttctcccggtgtttctgtaaagcgcagcttcaggccatatgcctgtgcaatattcgctgtagccggtacaggaactggcaaggtgccatgctggcatcttacatagccctgaccttctgcaagtggggaaacaatgactttctcaatgcctaagttatccaggcagactgcagtactgataatatcaacgatagagtcgatggcgcctacttcatggaaatgtacctgatcaattggaaggccatgtgcctttgactcagcctctgccacaatttcaaaaatacgtcttgccagctgttttactttatcggaagactgcaggcggtcaataatggtgtaaatgtcgtagaggttgcggtgggtgtgtgggtgcatgtgatcgtgggtatggccgtggtcatgagtatgctcgtgatcgtggtcatgatctccatgatcgtggtcatgatctccatgatcgtgagtatgctcgtgatcatggtcatggccatgctcatgtacatgctcttcatattccagatgcacatcaaaatcatatgccttgatgccgcatttctccgtcgttccaaaatgcagatgatagccgtctactcccagacttgccagtgcatcttccagtacctttctgtctgctcccagatcaagaagcgctcctacggtcatatcaccgcttattcctgaattacactccagatataatgtttttttcattatttcttcaccgccattctgtttatttgtgttgcaatatatccggctccatagccgttatcaatatttactaccgaaattccatttgcgcaggaattgatcatggtcagaagagccgacagaccatggaaactggctccatatcctacagatgtaggtactgcgatcaccggtgcgtctgccagacctgcgatcaccgttccaagagccccttccattcctgctaccgcaataatgcagtttgccttgcaaatacgctctctctggcttaacagcctgtggatcccagcaactcccacatcatagatgcggtctacctttgttccgaaatactccgctgtctgggctgcctcctctgccaccgggatatctgctgtgccgccggtacatactgccacacagcctacaagctccttatccggcttttccacctttacaatgcgggaaataggatcatagactgctgccggtaccagagaacggatcagctcatactgggcctgactggctctggttccaagaacttccccgtctctttcataaaatttcaggaatatctcttttaagtacggatccggttttccctggcagaaaatagtttcgccaaaaccggaacgcagtttcctgtgatggtccagctttgcatagcccagatcctcataaggcagatctttaagcttcgcctctgcctctgcaatatccagctggcccgcttttacctgttccagcatcttatgcacatccatgcttcatgctcctccttttatccacaattattctattagaaatccaccggcaccggcaaaacactctgtcgatatccggatctgtatactttttaatatctgccgacagcaggattttaatataggtcctgcaactactctacaactggatccgtcctgtacagattcgctgaagcagcggctctgaatggcttaccactaaaagtccgatctcccggctccgtacttcctccagcagaaaattccatatctggctctgtgtgatcagatccagcatggctgtgatctcatctgccagcaaaaaactggttttttcacctaatgcccttgcaatacagaacctttgaagttctcctccggaaagttccccaggataccgctccatccattccttctcgatcccaagaccatggatcaagcgttcatctaatacgccgccttcttccagaactgttttcatctttcgtctgggattgactgcctcctgtggatgctgccagatcagctgtaccggacagtaacctttatattccgaaagtggctttccgtccagtaaaacctggccttcatctggctgttcataaccggccagtattttacagaacgtagtcttgccaaaaccactgggtgccgcaagccccaaccggtcactgctgtcaaggcttacagatacatggtttaatatctgtctgtttcctttatgatagcggaaagacaggtcttttgcttctaatctcataagctgacgccttcctttccccatgcattgtattcaccggacctttgtcccgacgccatctgctctgacgttatttgctctgacgtcatttgtccctttaatcccgctggtcccgataatattccaggtaagatctcattttcatctcccggacagatacagcgcaccagtcccccctgatagggcacataggaaacttctttgctgcattcggtcttatatttggggcatctggggccatagggacaaccctcaggaagatctcttacataaggctggatccccggttccggggcaaatccatgctccggcattgcccgaaacagcgccctggtgtacggatggcgcaaagccgcctcccggttaaaatccacggtatccgcttcttccacagccgttcccgcatagaaaacaacgatcttatctgctgtttttaacgccagctccagatcatgggtgatcagaagcactcctgccccctgatctgcgatctcacggaaatgggacagcacccgcagggccgcttccatgtgaagcccaggcgtaggttcatctgcgatcaccagctggggctgttccaccaccgctgttccgatcagcacccgccttgccattccgccggaaagttcaaaaggatacatatgatccacttctttatcaaggccataccgggccagtgccttccggcttttttccaaactgatccgttctttcccgcctgctacctgctctcccactttcatcaatgggtccagataagaaacactctggggaaccaggacgatctcatggccccgcagctttttgatccgctttgaggtcaattgctcgcctttataataaatatctcccccacattttccattataaggcagaacccccatgactgcatgggctaaaaggctttttccggagccgctggaaccaaccacagctaccatttctccccgtgaaacactgagactcagatcacggatcacaggcagtgtttttcttgaaaaccagccgtcatattgggtaaatgtaacggataaatgtttgatgcgaagaagttcttctctttcaaactttttctgttttcctgttttttcagatttttctgttttctcatacatctttatgttttccatctgcatcggcgcctcctttccacctttttcccgcactttcctgcgttctctttttatgcttttcctgcgtttttcttcatgatcatcttttaacagcatctatcttttgctttttatactcattttccctactcatgtgccctggacggatccaaaagactgtttaacgtatcaccgatcacatgaaataacatgactaccagcaccaatagtattcccgggaacagcgccagccaccattttcccatagtcagatatttcatgctttcagaaaggatcacaccgatagccggctgctccggtgatagtccaaaacctaaaaatgtaatgcttgcttcgtggagtatagcatgtggaaacataagtaccattcccactaatacctgtggcaacagatggggcatcatatgcttgacacctatctgccatggactcatacccattttttcagcgatctttataaaatggctttcctttaattggagcacttccccgcggatcaatcgtgctaaagaagtccagtgggtcaggataatgcctgttgccacgccttttaaaccttttcccaatgcaaaagagatcaggataagaagcagaatatggggtattcccatgaccaggtcaataaaaccactgatcaggctgtctgcccattttccgcctgccgcacaggcaagtcccattcccactgcgatcagggagctgaaggcagatgtaatcaggccaatgcgtatacttaaggacaaacctgtaagggtacgcacaaacatatcccggcccatccagtctgttccaaaaggatattgtatacagggtgctatatttttcctggtaaaatccgtagtcagtgcctgttccttcagacagacgcctgcaaccagcactgccccgatcactaataccgccagtgccataagcgccgtcataagcacacgcctgctgcttatcccctctgtccgtttcaaatacttcttcaaattatcattacctttcatcccccattttcaaggttttgcgattttattttgcgcctcttctcattctggggtctatgatctcatataaaatatcagcaataaaattgcctgcaaacaccatcgctgcactgatcatggtaattcccataagcagcggaatatcactgccaagacctgcgcttactgccgcctgtcccagtcccggataggaaaatacctgttccaccagaacggagccgccgaagatctcgctgatcgaagcaaactgcagggtcagggccggaaggatcatgttgcggagcccatgtcttaaaacaatggaactcatgctttcccctctggttcttgcaaaaagcacataatcactttccataacctggatcattttctccctggtatggagggtgatattggaaatgcctgtaagacttaaagccgctgccggcaatataccatgacggatgcggtctgctatagaaacggtggctgcatctgcgcctatgggaacgcttaaacctacgggaaggacttttaaccacactgcaaacaccataagaagcaccagagccacccagaaggccggtgtactggctgtaaccagtgcataggcggagatcacacggtctgtgagacttccctttcttgcccccgctgtcatcccaaggatcacaccggtaactccggataagatccacgcagccgccatcagccatacagaactggcgaaacggacctggatcacttttgccacaggctgatgatataaaagggaaattcccatatttccccggataaagtccccagcccacgcaagatagcgttttaacggcgggattccttcgccccagtaaaggcggagacgctcgatttgctccgggctcatggaacccatagccgcctgacctacgttagtctgcagcgggtccagaggtgccatggaaaccaaggcaaaagccgcaatactgacgaagaagagaaggatcagcatccgtatgaaatttttactgataaatatagcctgctttttcaaacttatctgctcctaactattttccgtaaacatccggcttttttccacaataactgttttccacaatatctctactcccaggtccactgatccacattatttacaattgaccagccatgtccatgtggatgaagcttctgatcagctacatggagaccctttctggaccagtagagatgatcaatgtttaccagccagatccatgggatatctccctcctgggtcacaccgttttctccatcccactgtgcttttttccaaagatcataggactcttccagagacgggcttgcaagggcctgatccatatattcgtccactttttcgttggaatatggggaatactctgcaaaggaactgttctgggctgtatggtaaatattgtaaaattccattggggtgtgggcgccccagccccacataagaggagtggactgggctctgtcataggctgtatcccagcctacaccttcaatggatacctggataccaagttctttcaactggttggctgtatccgctgccagcgcctgacggacagagtcgcttgcaggatacattaatgtaaatccggcctgaacgccgtctttttcgcggatgccatcttttccttctgtccatccagcttcttctaacaatgtttttgcagcttccgggtcataggaagtttcagaagcctcattgtaccatggcattttatcacagacactgtaagcagggctgccgtatccatttaacacatgttggatcatttcttccctgtcgatgcctaagttaatggctctgcgcacccttacgtcactggtaaaatcatttcctgctgccacaccatctgcggtcactgcgccggaaggaacagccggaaggttaaatccacggttatctactgttttaaacgccagcagatcatagccatccaccgtcaggtcagaataggaagccgctgtgtatgcaagatctgcctgtccagcctgaactgctgcaaaagccgcatcttcttccataaataaaacggtcacatgcttcattttcggcgcttccccataataatccggatttgcctcaaagatcacctgctgtcccttatcccactgtttcataatataacggccggaaccaatagggttctgtccataatcagggccataggcatgttccggaaggatacctgtgatcgccatggtgtatggccagatagaataaggccgtttcatatggaatactacggtagtatcatctgtggcctctgcctcgtccagcatggtaaaatcatttactgtactgttatcacgaagcgtattataggtaaacgccacatcctctgctgtcagcgcttccccgtctgtaaacttcacatccgaccggatggtcactgtccaggtcatgccatcctcagaggtctccatatctgtagccaggtcatatccaatggtcagatctttatttgtcacagtcaatgtactctggatcagcggttcatgaacatgttcccctgcgccccagccataaaccgggtcaaaacctgcctctggttctgaggatggacccatgactacgataacagagtctttttctgcatcctccgtctgcgcctgtgccagctggtccgtctgcccatttgcgttctctgtctgctgaccagaagcactgttgcctcttccgcagcctgcaaggcctgctgccaccaggattgccatcattgccaataaaaaacttttacggctctttttcatatttttcgttctcctctaaaatatctgaatttgatcaatacttcattcggtaccttctcaataaacaaaacaagaaggtatgaactgccccttcctatggcattcacaccttcctggtatggttatctttcaaaattctgtttttataaatcctgttttttatcttatgatctttcttgttacactcccgttcatcaggagaaccaccggcttctgtcggaaactgtatagaattgtaacacctaagcagttgttcgtcaaccgattgcagcctttttaagtgttacttattgaaacactcctgctgtccatgtattgcatgtacaataataaaccgtttacaatgtccccgcctgaaatcttacatacgtcctgtcatcaaaacttttattacctggtttcagtcccttggtagactcatataatctgcagcactggggatcttcctttaaaagtctgtccagatcctgttctgactgctgtaaggtcggccttaacagcggatatccgtcgcttgccaatatgatttcatgtttcccttccgaaagatggatcacttttattaattcatccggtatctcttctccgttcagcacggaatacccataagaagttccaactttattagcaaaggctgtagcatttacgatccagggttccacttttactctggcttcactggcaggtacctgcaatgccatcatcaagctgcgaaactggcttaagatcacatcacttctcttaggctgcagatattcccggccatccaccattgcctgacaatccccgatcatccatatttcatgtaaatattccgaataaataactgctgccgcctgcaaaccctttgaacggatgtcataagggaagtccactttctcatagaaatcatgaaacttctgattgcaccgtttaataaatgtctggcagtcttccgttcctttcaactctctcactgcctgccctgcaagttctgctgccagtcttcctgtagactttccttcataggtaaaattagactttggtgtcactccatcgatcactgcaatgaaatccggcatgatcaccagaatgtcttcacttaagcgccctggggattttccttctgttttggactcgatgattttcataaaatcttctcctgaaattaatactaaattattaaaatccttctttttctcctcttttcctacataatagacttatgaatatcttgcaaagaatctttactgactatttatgaggaaatcaaatataccctccatcccagagattctgagatggaaaatatcgataaaatgctgaattgtggcgatccttcttttggcggtgccatgtatgtctgcaccacttgccacaacatgaaatttgttcccttccgctgcaaaagccgcttctgccctacttgcggtgtgaagtattcccaggaacgctctaccagtatggcctttaagcttgttaactgcacacatcgtcattgtgttttcacaatcgatgagaaacttcgtcatttcttcctggaagaccgttctcttttaaactgcctttttcgtgctgttcaaagcgtcatccttcacatgtttaataagataaataagtctcaaaactttgttcctggttttatttgtgtgcttcacactttcggtcgccctcttgaatggaatccacatattcactgtattctttcggaaagcggtattcacaaatcgaaacaccgcttcagtttgccatgcccgcctttgtgcgggctctttttatcaagagttcgacggaagtcgaactttcctattgtagtacaaaaaaaccctgcgtgatttctcacgcagagtctcaaaatacttacatattttaatcaaatattattcgcatacatatggcatgagtgcgatgtggcgagcgcgcttgatagctacagttaaagctctctgatgctttgcgcagttgccagtgatacgacgaggaaggattttacctctctcagatacgtatctctttaatttgttagtgtccttgtaatcgataacgccgttcttatcgccacagaaaacgcaaactttttttcttctgcgcattccgcctggtcttctcatcttagcgccctctggtctgtctgttttattaaatgccattggtgttgtcctcctttattattaaccatggaacatgtccggcctgatagagcctagttgaacggaagtccttcgtcttcaactccgtccggaatgttcataaacccatcaccaatcgcgctggtaggagccggtctctgagatggagctgactgtccatagccgctcatatcagatgccgaacccttactgtctgcgaattcctggtcatcaaggatgacctcggtggtgtatatacgctgaccgtctttatttacatagctgcctgtctggagccttccggaaaccagtacacgcatgccctgacggaaatacttctctgcaaactcacctgcgcggtcgaatgctacacagttgataaaatctgcagtctggtcatttccatcctgacctctgcggcctcttctgtccactgcaagagtgtatctggcgattgccatagaacgctctccctgtgaatatcttacttccggatctcttgttaatctgcccattaagataactctgttcatacggtcacacttccttttttaactccgttttcacggtctgggtattcttatgcctcaaccttaacgcataagtatctgatcactggttccataatacgaacgtgagcttctacttcgttagggcatacagaatcggactcaaactggatgaagtagtagtatgcttcatgagacttctggatctcataagcaagtctcttcttaccccactcatctacgttggtcacagtgccaccgaaacgggtgatgtaaccttttaccttttcgattgctgctgcacgctcttcgtcttcaagcttcacattcagaacaacggttaattcgtacttgttcatcttgttttacctccttgtggtctctggcccctgctttcagtttcaggagcaaggattttatatgtcacgaatagttattctagcaaagaaagcctttaaatgcaagacctttttgcaattttttcaagactttttaaggacttttttgcgataacggccgccatttgtcaacggcacatacttaatttttattattcgcaaacattaccgcatattcaatagaatttctgaggcttaattcacttgctgtaccggttccggcctggtcaaatgcagttccgtggtctacggatacgcggatgatcggcagtcctaaagtgatatttacacctgccactgcatcccatgctttcttttcatggttgtatacaaaacctactacctttaacgggatatggccctggtcgtgatacatggcaactacgatgtcataccagccgcctcttgctttggagaatacagtatcaggcggtacaggtccgtctgcattgatgccttctgcctttgctgcctcaattgcagggatgatctcatcgatctcttctcttccaaacaggccgtgctcaccactgtgtgggttcaggcctgctacgccgatctttggctccttgatgcccagatccttgcatgccttgtctgcaatacggatcacgtctaatactctctgcttctttacacggtcgcaggcttcacgcagggaaacatgggtggaaacatggactactcgcagattttcatgtgccagcatcatggtatagttcttggtgccggtcatatctgcgtagatctctgtatgtccggaataatgatgtcctgccaggtttacagcttctttattaaaagcattggtaacagtagcatctaccttcttatccattgccagttcaataacctttgttacgtatttaaaagcggcatctccgcacatagcggaaacttcccctctttttaactgtgccatgtcaaccagacccatatccagcacatcaatggttccatattcatattttgcttcagaaacatccttaatggcatggatcttcatttctgtatgtcctacaataggaagtgctgcttccattacgcaggcatcccctactactaccgggttacacaggtcatataaggacttgtctgcaaatgcttttacagtaatctccggtccgatactggccggatctcccatggtaatacctacgatcttcttttcgctcatatctgcctcctgaaaaatggaataataaaattttctgtattcaatataccatactttattgaaaatagtatgtcatatgcttagatttcctactcagacacgcccgctgacgcaggcggtcggcatttctgtaacaaacaggaccggatgcttccacccggtcccacttatcttacagccaaaccagctgtacttattcttttattatctatttacttattttgctgctctgcgcttatcctcaagcttatggagccatgatacaaggatcgggcagcagatagcggttacgatgatagctgctgtgatctgagcagttgctgcttcagatactgccagtaaagttgcatctacagctgctacagatgcaggagttgctgctgcgtttcctgctgttgtaccaatagcaccaccaacttccggatgatccattcttaacagcttgtatacaaggtatccaaccagacctgtaataagagtacagccaacacctaaaaggattccagggccacctgccttgatcaggttcatgatgtttaagccagcgcccagagggaatgcgaagaacgggatcagcatagaagcacctggttcgcagaacttacggatgtcttcatctaagttacccatgatacaaccaacgattacaggaatgatacagcctacaagtacggacattgggatctttgcaacaccagcagcacctaaagctaccatggtgaagaaaggaccatcgttgatagaaaggatagaaacagcacctacgtctgttgcatcaccgtactcaccagctaatgctgcgtacagaccaccattggagtttgccagggcacctacgatcgccagtgtggacagtcccaggaaacctgcttcgccaaacagcttaccacagatcagaccaatgataataccaacaccaactttgacagcggtaattacaacgcctttataaacggtaacgcctgcttttttgaagttgatagttgttgcattacagaaaatgaacactgccaggatcggcattgcacctgatttccaaaggtatgtagtaaatgtaccatcaaacatggtccagatcgtaccgccaaaaaatgtattaataattgcacctaacagcaacggaactaccattaaaccaccaggaatttttttcacgcttttcagaatgttcattctagtatcccccttatgttaaattatattttttattttgcagcgatcagtcttaaaacgttatctactgtataagccaggttctccttgctgtgatgacggcttatggagaagtcctgaggcaaacggttgatagggaatacggcagttacacccatttcgtatgccttatcgatctctgcatcatctgcaccgcctacaacagcgatcacatttttatcctgtttctttgcacgctctgcaataccgatcacaactttgccgcgaaggctctgggaatccagctttccttcaccggtgataatataatcagcatcactgatcatttcgtcaaactttacagtgtccagaaccgtctggatacccatctgcagacgggagccaaagaaagcgatcatgcctgcgcccatagcgcctgctgcgccggttcccggaacttcactgatgtctttgccaattgcttctgtaatagcacggcttaaattcttgataccttcatccagctccagtaccattgcctcatcagcgcccttctgcggtccgaagatgtgagatgcgccggttggtccgtacattgggttatcaatatcacacatggtaacgatctcaactttatttaagatctctgccttgccgcttaagtcgatcttacagatatctgcggtggttccgccggttggaacgaattcctttccgtctctgtcatagaatttaacgccaactgctgctgctgcaccgcaaccaccgtcattagtactggatccgcccagtcctacgatgatcttttctacgccgctttcagctgctgctaagatcagctgtccaacgccatatgtagtggtctttcttgggtccttgcggtcttctactaatggaagtcctgcgcaggaagccatttcaatgactgctgtcttgccttcgttgatcagaccgtagtaggagtccatatcttcaaaatatgggtttttaacctttacagttaccttgctgccgcctaaagcggtaataaatgcatctacagagccttcgccgccgtctgctacaggaacgcaggctgtttcagctccaggaaaatgtttttctactttttcctttgcaatctcgcagatctgctcagaacttaaggttcccttaaatgaatcaggaatgagaacaaatttcatgtctgtctttctcctttttctttatatgttctctcggaatctttctgtacctgatcttgcgagaaagactccgggagtacatttatttcatctgtctggaaacacaccagaaagcctgcttccagacaattcagagttcaaagttgatcaattactctctgacgataacagatacaccatccgggataacagttaccttgtagtcatccttcttaacgatggcttttgccttctccaaagcttcttccatgctgtgtgcaggaaccatatgcaggtcttctactaactggtcatcgcaggaagatacaaatactacggttgcctttaacagcagtcttgcaaagatctgggactgccactggtcgataatggtctcttccggttttctgtcaaggaaggtcttcatcatacggttcagatccttctcatcacggaaagtctcatggaagtattttccgccgtgtccatcagctgccttggaaagcatgatgataacgccgccttcctttacagttgcctcagctgcggtcataccctttacagactgataaatgttctggtccagaggatatccgccgttggtggagataacgatatctgccggaattgcatctacctggcacttggaagctaagaactcacgtccaactctgtgagccagatcacagtcaccagctactgcaaaaataggatcatgtgctgcatcaataactacatttacgatgaaatccagtcttgctgctcttgctgcatacagcatatcattgtggatcgggtttccttcaacaacaccggtacgtgcatgaggatcattaataaatccggagttgtggttgtacataacagtctcacggcttgcaacaccaggaagaatactctttctgccgccggagaaacctgcgaagaagtgtggctcaataaagccttctgctactaacaggtctgcttctgctgccagacggttaatgatcagattgccgccggatggaagcttgccaaggtataccaggttgtccttgtcatcgcaatcatgaactacgatcttctcatttgccatgatctcaggaccaaattttgctgccagctcttctttggtagttgttctgtgaagaccggttgaaataagaatggtaatatcagcatcaggattgcccttacggatctcagctaagatcagaggcatcatgatgtggcttggaacaggtcttgtatggtcagaagaaataacaactacctttttctttccaactgccatatcgcacagtcttggagttccgattggatgctccaaagcatcctgaaccagctctgccccgctctttggcgccttgtagctgtgaagttcagataacagcacacctgccagatgctcatcctcgatctttgctgttaatttttcttttccataaggtaataaaaattctttcatctctgcttcctcctgttttaaatgaatgattggatcgttaagttttaagttgtttttatgcttctttgatcttacgcaatgcaaatgcagctgcatcatcagctccaaaagcacctgcctttgttaccagtttcattccttcgtactttccgccttttacccggactaacgggatacctacgcggatctcagaaaggatctgtgaaccgtctgcttcaatgttcatcagcattccaagggctgtatcaccacctgtaagaaatacaccggaaacctttacctgttccaggatttccattgccagacggccaactatggaacgtaccttatcaccagtctctacagggccaagtcctaacgcctcaccagcttcaaaggaaagctccagttcgcttctgtcataggctgtattagtaagaagaatggtatctttacctgcctttaaagaatctaccacttctttcagataaggctctgtctcttcttttccggacagaatatcatgcatcggaagctttaccatcttgatacccgcttcctcacagtatttcatctgccggttggtcacggtgcttacgcttgcaactactcccagtgccggaagtgacggacgttccagttccatcaggttatctgccagacctgcggtaccaatataaagtaccttctttcctgtctttgcaactgcctttaaaactttctttaagtcatcattgcagtctgcatcgcatacataaatgcggccttctgtaaagtcaagatcatcacttctcacatccggaagtctctttaaaatgaccttttcttcataatatcttcccagcatccgtaccagattatcttctactaccgggttcttagggtcgctggcaagctccgtgcggcagatctctacgccgtttaaacactgcaccccatctacagtcgttctctttaaatccggaagagccggtgcaaagatcattaattccggtttgaaatgttcatctactgccttgatctctgctgcaatatttcctctcatggtggaatcaacttttttgatcacatagcggaagctgtcaaaatccacatcttccagcgcatgggacactatctcatatgcatgatcaggatgaactgttctggactctgtatcaatgacaatggatctgtctgcacccatcggctttccgcaaaacagcacttctgttggaaaacctcttctgcgcagctggactccggtatcattggctccggtaaaatcatctgcaatgatcaggtatctttcttccaaccatttcaccgcctttctaattgttcatttttgaaacacttttgtgagagttcatattttttttagatttttttctcattcgttttatattctacacgcttttgtctttctatttcaatgaatttattgtataatatgtttaaatttgtaacatttataaatgtgaggtgacttaaatgataaaaaaaatccgtatactgggaattgctccctataaaggacttgccactcttatgaaacaatgtgccctgcaataccctgagatcgaatttaccgcctatgcaggaagcatggaacagggacttgcccttgcaaaacgctacagcgaacattatgacgttatcatctcccgcgcaaacacagccaagatgatctcccagtctgtgcatatcccggtcatcgatattggtattggctattatgatgtactgcgctgtattaaaatggcccagaataccgggaccaaatttgcccttttaggctttcagtctttgactgtcatcgcaaaaaacctctgcgatcttctccagatccatgtagatattttctccttctccgtagataactggaaaggctccggcgatcttctggaccgtatgaaggaacagggctataaaactgtagtctgcgatatgatcccttatgaccatgcaaaaatgatcggacttacgcctatccttcttacctccagcgcagaaagcgtaaaacaggccatggaaaatgccattggcacctggcagcagtaccagaagctgtgcaattccaatgccatgatgcagtccctgatccgcagcagctccaaccagtatctgatcctggatctggaaggccgctgccattattccacaatcaatgatgaaaaagaggaagaatttatccagagcctgcaaaaagagcttggaaaatgccgcacttcctccaggcgttctttctttgtcacactgggaaaccagctgtattccgtccgctccagcctggctgaggaaggggatttcccttatatcatcttccgcatcatgttatccaagatccctttaagccactctaaatacggcatcaccattatggataaagaacaggcattacaaagctttattgaaagcttttacagcaatacagaactatcccgcagcgctgccgctgccatggatcagtcaggttcttcttcagtccctcttatgatcaccggagagatcggtacaggcaaagaccgtgtagcttatctccactatgcaaagagccagtttaatgatgaaccgctttacgttgtaaactgttccatgttaaatgataaaacctggaatttcctgatcaatcattacaactctccttttacagacaacggaaataccatttacatctccaatctgggcgttttgtcccacccgcggcagaaacagctgttatctatcatactggacaccaacctgcatatccgcaaccgtctgatcttttcctgcacccaggcaaaggacggtcatatgccccatgctgcattggagtataccaatatgcttggatgtgtgcctcttcctatcaagcctttacgggaacagaaaaatgacattgttccttcagccgctctttatattgatacgttgaaccagaatctgggccgccaggtggtaggactggaagacggtgccgcaaagcttcttatggaatatgactatccatgtaaccgcacccagtttaaacgtatattaaaaaaagcagtactggaaaccagcactgcctatatatcccgtgataccattgaaaaaatattaaaagaagaatctgcctttttcccggatgaccatgaagcgcatatgataacacattccaaagcagccaccgaaaaagaaggcttttccctgaacttagaacagcctcttgaccgcatcaaccaggacattgtccagcatgttttaaacagctgcaatggaaaccagacagctgcagcaaagaagctgggaatcagccggaccactttgtggcgctatatcaaccggtgatctcgtcttttttctttaacccttttgtattcttctccaccagtctgcgggctaccatgatctggtgcccgcagccggtacattttaagcggaaatccgctcctactcttaagatctcccattcactgcttccgcatggatggggcttttttaattttacgatatctcctacttcgtagtttaaacgttctcctggcatagttctatttctccttggatcttcctgatccattgtcatttccaacaactgttcccaaaacctttccgatgctgtcagaaatcaccagatctgcctgggagtccctggatgttacgcttttattgatcagaaccagcttgttgcctctgtaatagtcaataagaccggctgccggatagaccacaagggacgtacctccgataataagcatgtccgcgttgcggatataatcaatggacttctggatagtccggtcatccagtccttcctcataaaggactacatccggcttgatacggccgccgcaggtgcaggtaggaacgccttcgctgtttctcacatagtccagatcataaaactggccgcagcgggtgcaataatttctgtgtacagaaccgtgaagctccagcacttctttgcttcctgccatctgatgaaggtcgtcaatgttctgggtgatcacagcctttaattttccttcctgttccagttttgcaagggctttatgggctgcattaggttttgcatccggaaacagcatacggtctttatagaagcggtagaactcttccggattttgtatgtaaaagctgtgactgatgatccgctccggcgggtacttatatttctgattatacagtccgtccacactgcggaaatccggtatgccgctttccgtagaaacaccggctccgccaaagaatacgatgttgtcgctttcattgatccagtcttttaactgctgccatttttcatccatatgcgtttcctcctacacaacctcgtccaaaaataccccttgcagcgtcctcacatattctgtccagaacggtggcatcacacctaatgtctcttccagcgtcttgtacccaaagatccactgtgccaactcgtcaatgttgatctccaacacttcgctggaagatgggatctgttctgcctcatctgcctctgtctgcagccccagtcccttcatccgttccagagtacttccattttttcccagtttccacaaccagcatccttcattttccgaaataatcggatcttttatggaaagaactgcctgaaatttatctcctggcgcgttttcatttaatccaatgacttctaacaatgatcttacatctgtgatccggaccatgatcgccgggtgcatatctgaaggctttatttccgatatgctgtaataaaaccgctcttctctttttccaagtccccaccaggcttccaaagcatgaagttttccgtctttttcatacagccccgtcacttctcctgcttcactttccagctcttttttaagaagttccatataagccctgtctctcactgcatagacttcataacgtttctcaagccagttattcagccagtgagccagctcttctgacttttccgccagatctacaggaaccttttccagatctttttccggttcatcctcaggcttccataccggctggtcatagataaaagcaaactgaaatggccggtagatagcctctgcagcaggcatcaggaagcagaacggctttttctcctgatttaagtcccggagcatttgattaagaacctggcgcatatagcctttatggcgctggtgggcagctgtggctacaccaacgatataaggcagttcccatttttttccatttacagaaatggtatagggatttaagtgagccatggtcagaagttttcctccttctatggcaagcactttactgccgggaagtttttcggaaaaatagtaatctgcaaagctttttgagtcttccggaaatgcctcttcccataagggcctgcattttccatattcacttttctctaaatatcgtaccatatccgcctctttctgcccagtatcacagcctcatttaatggaatatttcatcctcattttcatgatcttagtatttcttcttaaccgaatattttcttgcaaaatccaccggataatagctcatcttcgccttgcgcagtcccggcatacctacatcatcttctctgtttaccagggctacatccgggaattcatgaactaaaaactgctgattgataaactgatacagaccgttgatctccggatcagccttttcaatatggatcactgccatattttcccgctcatttaagcttcctactgtaaatgccttcaattccccgtcaatgtaaacgcctgccatcggcacattgaaagcagagcagttctttaaaatatcatggataccggctacctcgtaatccagggagatctcattttcataagactctactttctgctgtctccatttttccataaactgccatacttcctgacggtcggagcagcagatcctgcggtattcatatctgccttcataggtctttaaaaagccgtttaagcggtttttcttcttatgaagcttctttccagccagtgtacgcatggcatttccatcataaagataatctttcagatcatctaattctgttacttcaaacttttccggatccaggttcagatattctacagcttctgcatcagccagagaaatatagaaaggtttatggagtacattgtcaaaataatctaccatctgatagaagaaatatggaagatcttcttccttgcaaagaggcatggcgcttgaaagtatgccatctttttccataagccataaaactgccttgtcttcgctgactgcacattctaccttgtagtaatctttccataaaaaagagtccaggaatacgctgtcacaggtcctgttgggcctgagaccataaaaagggcgcagcctggacatatcttcagcctctacaggcctaaaattcaaatccatttcgtacctcatttcttttttcgtttgcgcacatcagattataccatatttcctatctatcttacattacttttttctccatagcacaggcggtccacctacactcccacctctttcaccagaagcagcctctgccccgtttttacctgttcacctggaagttcattggtggtaacgatattttccactgtagtatgaaatttttttgcaatatcccaaagagagtctttctcctggacaatatatccgacgatcccgggaagttcctgtaactgtttcagatccaggggttcttcctttattccggttatcaccgtttcctgtaccggttccaggatcataaagtccagggctgccacaccttttacttccaccgtatctgctcccgtcattacagctgtcagctgatctactcctgcatccagctgataaatactctttttggtaatacctgctgcctgggcgctgcatttaaaagggatctgcctggaaacagactggattggggcactgtcatcactggtgagatagagaatggtcacatccaggattccttctatatccaaactgttttcttccggttcgatctcatctaactgtaccattccctgggtatggcagatctgaaggatccgctcctgctgccccagatgtattttctccccaatcctcggtctgcatacatttcttgcgatcagccggtcatatcccatctcatttttctccggcgtgatctgacagctgttagaataaatatcttttaacagcatttcttctttttcttcatacagccggatatccagatctaagactacatccagatccagttcccgcatctgcccgtccggatccggtttcgcctccacttctccatgagccaggcgcaaagataccatggggatctgtccttcatgtgcctgggctatctctatatcacctgaaaatgggatcacctcttccatccactgcaccggcatattttcttcttctgtttcatagatcacaaataatgtaagctgtccttccaggtgcaggcggccatctaacggctttacagactggctgcttatggaaatatccttccacaatagattttctatatccggtcttccccctgtaaggaccgtattttcccgtatacggtaagtatctttacggtgaagagccagtataacaggagaaatacttcccattttcacttccgggggcatttcttctgtctgacttgaaaaacttccggctgttcccgtctccttcaggtccgaagctgccatctgggatgtttctccctctgtatggatctccaccgtgatcacagcttttacccccagcttcctggaattgatcatatccgttttcatgtcttccaggatccagtttaaacctgtatgatctccttctgccagtcccggaacatttacagtctcttcaaaaggaatgtttcctcctaatgtttccagtcccccattttcttttctgtaaagaacctgaaattccagttttccttttacggttatcttctcctcctgggtctttacattttccccctggatatgagcctgctccagtatgacctgttccatatcttccagtgtatcaggaacaataaaatcttcatccagagtgatctgggtcactgcatttcctttccaccggttcatatgtatctgcttctttattaattccataaaaaacacctgccgttctaatagtcttttacgaaagtctatgcggacaacaggtgttttataactttactgcttatttaacttttcttttaactggcgtatctcctcttccatctggagcatacgctctttcattgtttcatattcttccagagtcatggtctctttccgttttggaagtgtaacaccatctttttttacaggtcttgcaggaattcccactgctgttacattatcttccagtggttttaaaagaactgcattggcagcaatggagcagttgtcacctacttcaaaggctcctaatatcttggctccggcacctaccattacattatttccaagagtaggatgacgtttgcctttctgggtaccaacaccgcctaatgtaacgccctgataaatcgtacagttatcacctacaacagcggtttcaccgatgaccacgccggaaccatggtcgatcaggatcccatgtcctaactgcgctcccggatggatctcgatcagagtgaaaaatctggcgatctgtgagatcagtctggcaataaagaacattttgtgcttataaaaccagtgggcaaaacgatgccagatcagagcatgtatcccctgatacaaaagtaaaacttccaaagcacttcttgctgccgggtcacgttcctgtactgctttgatgtctaaccaaatgtctttaaatatcataatacggctccctcatggtgtattcgcaatgcgtcactcatggacacgcactgacgtgctctactgtctgcttacgcagacggtccattcgttaatggcccaaacaaaacaaatgtctgctgcgcagccgcttgtttttctttagggctcattatatcatatgttatttttcaaaaaaagagcgcatttttatttttcatgcatttttattgaaacacaaccggcagatccagtaattccgttttcaccacaatatatggactggagctctcaacgcctttatcctctccattttcaggtccttttaattccgttgctattacaacagaatttcccgtcagatacagctcattcacacagatgctgtatccgccgccttcctggggcccatatccaacagctatgtacagattttcatctgttgtataggtcattttaaagggtgctgatgttttctgtttgatcagcgtctgcagctcctgaggaagtccactgtcagaaacaggcgtgatcgtgaggtcccgcaccttttcctcttttttgcccagaatactgcagccggataaaagcaggcaaagtgccacgatcccggcgcagactgtacataataaacgctttccgtttttcatcaaaaaaatctcccggatatactgttacaacaatatatccaggaaatttcatttctatgtttgtctgtttgatatttattagcagatctttctgatccagccttctggagcttcgatacggcccatctggataccggttaaagtatcatacagcttcttgatcactggtcccatctcatccataccgcttgggaagcagatctctttgccgtggtctacaaccttgcctactggggagataactgctgcagtaccgcaaagtccgcactcagcgaagtcacctaactcagacagcttaacaggtctctgggtaacctttaatccaaggtagtgctctgcaacgtataccagagaacgtcttgtgatagaaggaaggatagagtcagactttggagtaacaacttcgccgtccttggttacgaacaggaagtttgcaccaccggtctcttctacataagttctggttgccggatccaggaacatgttctcatcaaatccatttgcatgtgctacttcatgtgcatgaaggctcattgcatagttcagaccagcctttacatggcctgttccgtgaggtgctgcacggtcgaagtcactgacgcagatggtgatcggcttagcgccgcccttgaagtatggtccaactggtgtaacgaacattctgaactgatattcgtgggatggcttaacaccgattacaggacctgaagcaaacatatatggacggatatataaggttgcgccgcttccgtaaggtggaacccatgctgcgtttgccttaacaacctgatctaatgcgtctaagaatttctccttagggaatactggcatttccagtctggatgcggagtccatcatacgctctgcgttcatgtcaggacggaaagtaacgatgctgccgtcttctgttgtgtaagcctttaagccctcgaaacattcctggcagtactgtaagatacctgcgcactcgttaatagtaacattggagtcagcggtcagagttccctcatcccatgctccgtctttatagtttgatacataacgcatatcagttggcatgtagctgaaaccgatatttgcccagtcaagatttttcttttccacgatcttgtatcctccgtttcttaattcttcttactgattttcatcattttaaatatgtacttaccttgttgctcattatagtctcattatttctgaaaatcaatgaaaatttgtttcatctgctatgcaattcatgcatatctggtataaccgcgggctttaacagctgccccggctatatactctggttattttccagcgccttctcctgcaaaatattcttttgtcagtttcaccactgttccggaaagaaggaacagggcgatcaggttggggatcgccataaggccgttaaatgtctctgcaatattccacatcagacccagatctgcagtagcccctaaaatagccaccagggaatatgctaccataaacggcttaatgactttttctgagaataaaaattcaatacatcttgcgccgtaaagtccccagcccagaatggtagagaatgcgaaacagcacatggcaactgcagtaaagacagatacccagtttccataaacagaaataaatccctgaatagtcagctctgcgcctgctgcctgtccgtaacctaccggtacctggctgcaaaggataacaagagctgttaatgtacagatcacaatggtatctgtaaatacttcaaaaataccgaacataccctgctttaccggttttctggtatctgcacatgcatgggcgatagagccggtaccaagacctgcctcattggagaagatacctctggaaacgccttttttcatactcataaacagacttcccactgctccgcctgttacagctgcaggtttaaaagcaccttcaaaaatggcctggatcacagatggaagtgcctggatcctaaagaggatgatacctacagataacacaatataaaggagcgccataaaaggaaccagcttctctgttacctgaccaatacgctttacgccgcctaacaggatcagggctaccaaagcggcaatgatgataccctggatcaggttggaagtctttactgccccttctgagatcagtccgcagcttaagagagcagagttcacagccgttgtgatcgtattgacctgggtggcatttcctgtaccaaatacagtgagcacaccgaaggcggaaaacaggacagctaaaaactgccagttctttccaaggccatttttaatatagtacataggaccgcctaccagatccccttctttgtttgtctcacggtagtagacagccagagttacctctgcaaatttggtacacataccaagaacggcagaaacccacatccagaacacagcgcctggtcctccaatggcaatggctcctgctacaccggcaatatttcccgttccaactgtggccgccagagccgtacacaccgcctgaaatggtgtcagcgctccgtcagaagcatttctcttgcggaacatccttccgatggtagtctggatggcataggagaacttgcggatctgcaaaaaaccggtacggcagcttaaataaaagccaacgccgatgatgcagaccattgcaggaacaccccagataaaatcattcacaacctggttaatcgtttcaatggtgctgagcatggataaatcctcatctttctaaatcaaaactgatcaaaaattaaaacttgatttcttttccttccagacgccactgtctgaattctgcagatgcagaaagaagcaggtcggaagaagagtttaatgctgtttctacagagtcctggatcacgccgatgataaagccgatacctacgatctgcatggcaatgtcattggaaataccgaaaagtgagcatgccatagggatcagaagcagggaacctcctgctacaccagatgcgccgcaggcagataaagttgccaggatacttaagataatggcacttgggatatcaactgcgatacctaaggtgtgggctgcagccagtgtcatgactgtgatagtgatcgctgcaccgtccatgttgatggttgctcccagtggaatggtaacagaatatgtatccttatccagtcccatttctgcgcaggcttccatattaataggaatgtttgcagcagaactgcgggtaaagaatgcagtaatggcactcttttttaagcacttgaagatcagcggatatgggttcttacggatgcaccagaataccaggatcgggttggtgacaaagtagataaacagcatagagcctaaaagcactgctaacagtttaccatattctgtgaaagttgaaagtccatttacagaaacggtattgtatacaagacccataataccaaatggagcacactggatgatccaggttacggtctttgaaagagctgcggaaatatcatttaaagactgcttggtggtatcagatgccttacgaagtgcgataccgataagaacggcccatacaaggatgccgatgtagtttgcagatactaaagactgtaccgggtttgttaccacattcataagaagtgttcttaatacttctgctacaccctgaggtgctgccatatcagttgccgcatccaccagtgtcagtgttacaggaaatacactgcttgcagtaactgctacgatagctgcaaggaaggtactgaacatatacataataataactgtacggatgacgcctccgtggctttttcctgcgtagcacagagaactgataactaagaaaaatactaacaatggcgcaatggcttttaacgcgccaacaaatacatcacctaaaatggcgatccctccttcggacggaacaaacattcctaataaagcaccgatcacaagaccagccacaatcctctgcaccaggctgatgccggtccaggcctgaactatcttcttcatactcttttcctattcccttctatttggtaaagtgttaaaaatacgcaacggaaaacattatacacaatatgtctgtaaaatacaaatgtttttttctggcggacacttttagatgattgtacacgaacctgcataaatttcccattgtcctaatatgatgtaaaaaacgttctcaaggggataacccatgaaagattatattgaagaacgagctgtcgccattgccaattacatcatagatcacaacgctactgtccggcagacagcaaaacgctttgggatcagtaagagcacagtacacaaggactgcacggagagactgatctccatcaatccggctctcgccgcccagacaagagtagtcctggatctgaacaaatccgagcgtcatatccggggtgggatggctacaaaggagaaatatcaataccagcatcgacttgccatctgcagtcgggaagagaagtaacgtttatttttgtaataagatagggttcagccatctgccgcctgcaggacctctttcagcgtatctttaaatgcaagagccgctttggaatggtatctgccaggcggcagtgctattcccagatcaataaaagcactttctgcacccagagataaaaactctgcatttctgaaataatgtctggaactgtaataggtaaatgcaagtcccagtcctgctgctcccatagctgctgacataagggctgacagcttgtgattgctggcaatcggttgtattccattcttattaaatatctgccttgcttcccggcccaggatcgtatcataatcgctgagaagatattcataggaaagtgtatcttttaaattcacatactgtggtatcctggagtccggattatcctcattatttcttgcaaactccatgaccgggtaggtatggctggtaataaggcatatctcatctttcaagacccactctatattcagtctgggatctgcctcagacataactaaaagggcaatatcgatctcgccggacaacagctgctgctctaataccatggaattttgctccacgatctccactttcacatccggatgctccaggcggaatgcatttaacactggtggaagaagataagaacctctgaaactgctgacccccatgatcacacggccgctttttaactgtttcatatctttgatctcgttttgtacagaccggtattctgccagtgtcttatatgcatactggagcatcagttccccttcctgggtcagacgcactccccgggaagtacggataaacagcttactccctacattattttccaatatgcttaaaaactgactgaggctggactgggccataaacagccgctctgccgcttttgaaatactcttttcttctgctatggcaataaaataatccagttctttcatttccatgatctgtatttccccctttgtttcgctgatccctgctgaccaatctgtgttttctttatagctatcggtttttccgatatatattatagcatattttgtattttttcgttggcaaaagtagattattataattacataagcgataaaaacagatcaataaaatattctctcaaattggaggtttattatgggaaagatttccatgaaaggtgtgtgcgatatgcacgtacatacaaatccagacttaaggctgcgtgcttatgatgactttgaactggcagatgcagcagtcagagtcggcgccagagccattgtcatcaaaactcatctgggctttacagtaaaccgtgcttatctcaccaatcagtacgtgaaaaaagtatacggtgaaaataccggtttcaccatgtacggcggcgttgttatgaacaaggtcatcggcggtatcaacccggaagccgtagaaaaaggcttaaagctgggtgcaaaagagatctggcttcctacccagtctgcaaaacgccatttagagaaaatgggccaggatccggctaaaggcatcgaattagtgcgggatgggaaggtagttccggaacttgtggatgtatttaaactgatccgtgactatgacgtagtccttggaacagcccatgtttccccagaagaagcatttgtagtggtagaagctgcaaaagatgccggcgttaaaaagatcgttatcactcatccggaatggtgggtagtggatatgagcatagatgaccagatccgcctggtaaaagattatgacgtgatcctggaacggtgttacgcacagaatatgggcggcggtgcttacaagagcaatctcccagacaatctggagcttattaaggccgttggttatgaacacgttatggtagatacagacggcggacagaccgaaaatccgcactgggagctggctttagaggaatatatgcaatatctggcagatcacggcatcccggaggagcatatttaccacatgacaagaaccattccttacaagcttcttggaattgaataagaagcttgcagaataaaagcttcaggaaaatataacacctatcaggaggggaacacatgttaagtatcattattattctttcaatcgcactggcaatttttcttggatacaggaccaagatcaataccggtcttttctgtattgtatttgcttacatcatcggatgtttcgttatgggattaaagccaaagcagatcattggtttctggcctacaagtaccatgtttgttatcttatctgtttcattattttataattttgcagcgatcaacggaacccttgagaaaatgtccggtgccctgttatacgcctgtcgcaattttccgggacttctgccttatgcgctgtttgcagtagcagtcatcctttcagttatgggagctacttttttcaccgttcttgcatttttagctccgatcactctggtgatctgcgatgagtccagaatggacaaactgaccggtgctgttgccattaactgcggtgctttagccggtggtaatttcccaacctccaatcttggcgttgttttccgcggactgtctgacactgcctatgaagcttctcctgaaatcgcagctgtagactcctttaatatggaaatgaagatttttgcatttgccatcttcttctccctgatcctgatcactatcttccgttttggctttaaagaaaacagaaatattggtaaaggtgttacttttaagaaaccagaaagctttacaaaagaccagaagactacccttaccttaatgatggctatgatggctgttgtcctgatcttccctctgttaaacatcctgatgccgggaaatgctgctgttaaatatatcagcggaaaagtagatgtaggtctggttgccattatctttactgtgatcgcccttttattaaaactggctccacagaaagaagccattgcaaaagttccgtggaataccattatcatgatcgcaggtgccggtatgctgatcgctgttgcagtagaagccggaaccattgaagcactttctacctggatcggttccaatgtaccaaagcctctggttcctattgctttctgcctggtaggtgccatcatgagtttcttcagttccactacaggagtggttgctccggcattgttcccgctgatcccgaatctggctgcttctgtaggtttaagcgcgccggtattatttgcctgcacgatccttggtgcccagtccagcgctatcagtccattttcttccggcggttccctgatccttggttccaccccgaaagaggaagaacgcaatgagctgtttaaccgtcttctcatggtagctgttcccatcagcgtgatcacctgcactatttataactttgtgattgctatggttctgtaaatataatcgtgtttcattcaaacgggttttctgtctttctttgcagaagacccgtttttatgtataatggatacagagtacataaacaaaaacggaggaacctcccatggcaaaaaaatccacccgcaacaccagaggccgcattgtaagcgcagcctggaagctattttatgagcagggctatgaagatacgacagtagaagagatcatcgagctttccggcacttccaaaggctctttttaccactattttgacggcaaagatgcccttctttctactttaagctctctttttgatgagaaatatgaggaacttaccggacttctgacaccagaaatgactgctatggagcagctgctgtttttaaacagggaactttttcatatgatcgaggacagcatttccctggacctgttagcaaggctttattctacccagctgactaccaatggggaaaaacatctgttagaccacaaccggatttactataaactgctgcgaaagatcatcgccaaaggtcaggctgaaggccagttaagcagccgttccaatgtaaatgaaatggtaaagctgtatgctctctgcgaacgggcccttctttatgactggtgtctttgtgcaggcgaatatgccctgacggaatacagcgcaaaggtccttccgggttttttaagcagctttcttccttaaaaatgtacaacctgctgtggatattattttaattcttattttttgtatatgttttatttattataatcgtacagttattttttctatataaacactgggtttttgtcacatttcattaatattcgtacagtatttattctatacttcattctgtattgtagtctatttttatgtatgttataatcgtcctcaatattatgttctcccgaaatcattctgcgcatgaaagactagggagatcattatttcgaggaggaataagattatgatttcaggacaggctggtatcctggcagccattgtgatctatctgcttgcaatggtgtatgtaggattttatttcagcaagaaaggcagcggtgattccgcagatgatttctatttaggcggcagaaagcttggtccctttgtaacagctatgagtgcggaagcctctgatatgagcagctggctgttgatgggtctgccaggcgttgcttatctcaccggtattgcagacgcaggctggaccgccatcggccttggcattggtacttatttaaactggctgatcgtagcacagcgtctgcgccgttactcgatcgtatgcaatgccatcaccattccggacttcttctcccgtcgttttaaagatgacaaaaatatcctgatgtgcatttccgccatcatcatccttgttttctttattccttatactgcttccggatttaaagccatcggaaccttattctccagccttttcggtaccgattatcacattgcaatgatcgttggtgcagttgttatcgtaggttataccgttatgggcggcttcatggcagtttccactacagacctgatccagagcgtggttatgtccatttccctggtcgtcatcgtattttatggcatccatatggccggtggctggagcgaagttgtaaacaacgctacttctctagccggttacctctccataacccagcttcatgacagggcaactgcttctgctgcaccttacggcctgctttctattgtatctaccgtagcatggggccttggctacttcggtatgcctcatatcctccttcgtttcatggctatcgaagaggagaaaaaactggtactttcccgccggatcgcaactgtatgggtactgatctccatgtgcgttgccattcttatcggtatcatcggatatggcgcttctgtagcaggttctatcccaatgtttaccaccagctcccagtctgagactgttatcatccagtttgcacatcttcttggacagaatggtttcttactgtcactggtcgcaggcgttgtacttgcaggtatcctggcatgtaccatgtcaactgctgattcccagcttttaactgctgcttccggtgtatcccagaacctgctccaggactttttaaagatcaaaatgagcactgccgcttccatgaatgcagcccgtcttacggttatgggaattgccattgtagccgttttcctggcatggaacccggacagctctgtattcaccatcgtatcctttgcatgggccggttttggagcatccttcggaccgctggtgctgttcgccctcttctggcgccgtaccaatatgcagggcgcactggccggtatgcttacaggcggcgttatggtctttgtatggaagtatctggtacgcccattaggcggaaacttcaatatttatgaactgcttcctgcatttgtcctttcctgccttgctattgtcattgtttcccttcttacaaaggagccttcaaaagaaatttatgatgaatttgattctgttggaaaataaatcttaagctataaatcaaagcttctttatataataaatcttctcttgacaaatcttcttatgtgtcataccttagattggtattaatgataatttttatcaacaaaattacccctggtatatccttttctataatataccagggacaaaggagcctagtatgacacttcgcgatctacccattggaaaaactgcaacgattttgtctgttggcggagaaggagctttgcgccagcactttttagacatgggccttatccccaaaggagaggtgaccatggtgaaatatgcccctatgggcgaccctatggagctgcgcatccacagctatgagctgaccttgcgccttgcagatgcagaaaaaatagaaattacagatgtaagggacggcgttcttccccgcccccagaatccggacttaagcaccattgaacagtccaagcctcatccaggccttggtgaaggcggaaaataccatattaaagcaacggaaaatccactgccggatacagagctgcttacctttgcccttgcaggaaaccagaattgcggcaagaccacactgtttaaccagcttaccggttccaaccagcatgtaggtaacttccctggcgttaccgtagaccggaaagacggtatgatccgcggaaagagcaatacccttgtaacagaccttcctggtatctactccatgtccccttattccagtgaagagctggtaacccgaaactttcttttagatgagcatccaaagggcatcatcaacattgtagatgccaccaacattgagcgaaacctgtatctgaccatgcagttaatggaactggatatccctatggtccttgcattaaatatgatggatgaagtgcgggataacggcggttctattatggtcaaccagatggaggaaatgcttggtatcccggtcattcctatttctgctgccaaaaatgagggcatcgacgagctggtagaacatgccatccacgttgccaaatatcaggaacctccaagaaccatggacctttgtgatgtaaatgatgacggcggtgctgtccatcgttgtcttcacgccattatgcacctgattgaggaccatgcaaaagccgccggtatcccactgcgttttgctgcctccaagctggcggagggagattcccttattataaacagcttgaacctggatgagaacgagaaacagaccttagagcatatcattacccagatggaagcagagcgcggcctggaccgtgcagcagccattgcacatatgcgctttgattttattgcaaaaacctgtgatgcttccgttatcaagccaagagaaagcaaggaacatctgcgcagcgtgaaaatggataagatacttaccggaaaatataccgctataccctgttttgcaggtattatgggactggtattctaccttaccttcggcgtgatcggaagtttcttatctgacctccttgacagctgcatttccgctctttccacgctggtagaccatttcctgatcctttggaatgtaaacccggtgatccattcccttgttatggacggtattttcaacggtgtgggaagtgtattaagcttcctgccgatcattgttacactgttcttcttcctgtctttgctggaagacagcggatatatggcaagagtagcctttgttatggataagctgctgcgaaagatcggtctttccggccgcagcatcgtgcctatgcttatcggctttggctgtaccgttccgggcgttatggcaagccgtactcttccatcggaacgtgaccgtaaaatgaccattttgctgaccccgtttatgagctgttccgcaaagctgcctatctacgccttttttaccgcagcattcttcccggagcatggcacccttgtgatgatagccctgtattttggcggtattatcatgggtattttaatggcacttattttacgtggaactttatttaacggagaagctgttccttttgttatggagctgccaaattaccgtatgccaggtgccaaaaacgttggtctgctgttatgggataaggcaaaggatttccttcagagagcctttaccgttatcttcatggcaacccttgctatctggttcttacagaccttcagcctgcgtttaaacattgttacagactctaaggacagtatccttgctatgatctccggcctgatcgccccattaatgcatccaatgggactgggagactggcggatcgccactgcccttattacaggatttttagcaaaggaaagcgttgtttccacgctgtctatcctctttggaaaaaccagcacactggtatccagtatgacttctctgtccgctgccagcctgttagttttctgtctgctgtatacaccatgtgtggctgccattgcttctattaagagagagctgggtggaaaatgggcactgaccgttgtgatcttacagtgtgtggttgcatggatcgcagcttatattgtttatctgatcggaggatttttcttttaaatatattttggtccggcttaccggatcatctcattcactgcacaaaaaagcagccgctctgccggttccatttatagggcctgcagcagagtggctgctttttatatgcatatatatgtttttcctggactgttaacgaaggttcagcctgcgtttatgataatttcttatataataagtttcctacactctggatcacctgcacaaagatgatcagcacaatactggtacttatcagatacggcattttataggcctggtatccataacggatggccacatcgcccagaccgccggcaccaatggcaccgcccattgcgctgtaaccgatcaggctgatcatagtcagtgtgatatcggaaaggatagccggaagagcttcttttaagtatacgcggaagatgatctgcaggtctcctgcgccgaaagaacgggctgcttcgatgagaccatggtctacactgcgaagagcagactcaatcactctggctacaaaaggaatggcagaaatggttaaaggcactaaagctgcctttgtaccaatggcctttcctgcgatcatacgggtaaacgggataacaataaccattaaaatgataaatgggaagctgcggaatacatttacaaggatatccaggataccgtaaatgatcttgttaggccgcaggccgtccggtgctgtcactgtaagcacgatggccgggataaaacctaagatcacggaaaaaatggtagaaccgatgaccatatatacagtctgcccgaaggctttcataattacatcatacattttcaagcacctcccataaaatacctctgtctgtaagccatgcagttacacgctctctgtctgcttctgttacattgatcaccaggcttcccataatggttccgcggaagttctccagcttgccctggcagataccaaaattgattcccagttcatgcgccaggtgagtaatagcactgtcgctggcagtttcatcgttaaagaacagacggacattgacgccgtcttttggaaggaactctacgctgtcacctacgaactcctgaacgtccttatttggcgctacgaacagttcttccggctttccggtagcgatcattttaccatgctttaagaacgcaactttgttgcagatctcttttacaacttccatctggtgggttaccacaacaatggtgatccccagctctttgttgatctttaaaagcagtgccagaataccttttgtgatctgcggatccaatgcagaggttgcctcatcacaaaggaggatctttggatttaatacaagggctcttgcaatcgccactctctgtttctgaccgccggaaagctgtttgggatagctgtttaccttatcctttaagccgaccagatctaacagttccataatacggtcatgattttccttgctgttcttattctgtccccagaattgaagaggaagggcaatgttatcatacacattcagacggcctaacagattgaagttctgaaagatcattcccatgtccttgcgcaccaactgaagttctttctggctgagacctgcgatctcctttccttctactgtaatagagccgccgttgtacttttccagtccgttgatgcagcgcagcaatgtggatttaccggcgccgctctgtccgatgatcccaaagatatctccctggtcgatattaatggaaatatcctccagcacctgaaggctaccaaattgtttgcttacgtgttcaatattgatcataaatttctccttctaaacagatattgaaacagatataaaacgggcaaacggctgctgcaaaatttcctgtttttcaggtttttacagcagcctctgccatctcataatctcatatcaggtaacattcagaagtgggggatttccggatgtttctgtctgttgctattgtatacagggaacggtaactgtatcctagaatgccgggataacggaaccgctgtacttctcttcgatgtagttctttacatcatcattctgtaatgctgcgatcagagccttagtcttagtgctttcttcatttccctctttaacaaccagatagttaatgtacttgtagctttcgtcactgtctgcaagctctgctgctaaagcatccttctcaggatttaagtttgcttccagtgcgtagtttccattgataactgctgcgtctacatcgtccagggatcttggcaggtttgctgcatccagctcagtgatctcgaaattatgtggattttctgcaatgctggtcaggttgtaaagatcctctgtttcagccagagtgatcagtccattgtctgctaacagcttaatagctctggattcattggatccatcgtttggtactgcaatagttgctccgtcaggaagctcttccaggctcttgtaattcttggaatagatacccattggctctaagtggatgcctgcaacttctactaaatgaagtcctctttccttgttctgctcttccagataacggatagtctggaaatagtttgcatcgatctcgccatcttccaggctggtatttggctgaacataatcattaaattcaactacttctacatcccagccagctgcttccagctttggaactactacatcatttacgatctcagcatgtggaaccggtgtaacaccgatagaaatcttgttgtcatcgccttccggagcaggaatttcgccttcagctgctgcctctgccttggtctcttctgcgctgctttcagctgcttcagaagaagctgcttcggtggttgctgcctcagttgctgctgcggtagtctctgctgccttgctgccgcatcctgcaagaacggtaattgctgctgttgctgctactgctaatgataaccatcttttcttcataatatttgtctcctctcttatcaggccccggtggtctgatctcccttgtttgtgtttgttgcttgttgtctgtgtttcttttgatagtctgaattctaacacatcccccttggtctgtctatttcataaaatctttatctggctataggtaaaacctataacaggcaatttctgattatgctatactctaataaatatacctataaaagaaaggcataccccccatgagcgaaacaaagatcattcccacaaccgggcggaataactgcggcggccgctgcatcatctacgcccacgtctgtgacggagttattgaaaaactttccactgaaacaaaaggaacaccggagcatcctgttcccttatgcgcctgcgccaaaggcttaaactaccataaaacatttttaggcgaagaccggcttcgctggcctatgaaacgggtcggtgaacgtggagaagggaaatttgcccggatcagctgggaggaagccctggatatccttacatctgaatacatccgcatccgggatacttacggtcccggttcccgctatgtcaatgacggctgcggcatcagcgctgttatgcgtggcgaccgtatgatgcagcgcctgctggcattggacggcggttatcttggctgctataactcctacagctctgcctgcatccgcaatgcaacggatattacctatggaaccagcgagaccggcacccatccttccgactggttaaacagccatctgatcatcctgtggggtcataatcctgcagagacaaaatttgacagcagcaccatgttttacttaaaaaaggcaaaagccgccggtattcccattattgtcattgatccccgaaaaaatgatactgctgttgccttaaatgcccagtggatccccatccgtcctgctacagacagcgctttggcggatgccatggcctacgttattataaaagaagggcttcaggatcaggaattcttagataaatgctgtcttggctttgacgcagcccatatgccggaaggcgcagatccatcccttaactgcctttcctatttaatgggcgaaacagacagtattccaaagacacctgaatggggtgaaaagatcaccggtatcccagctgacaccatccgtgagctggcgatccgctatgccaccacaaaaccggctgccattatccagggatatggcgcccagagaaatgcatatggggagcaaagtgcccgtggcgctatccttcttgcctgtcttacaggaaatgtaggcatcagcggtggttctgcagccggtgccggtgactgttccacccatgaactgccgggatttccggtccttgataatccttataacagagcactgccagttttcctctggactgatgcagtggatcatggtaaaggcatgaacgaatatgacggcatccgtacctgcgatcaggggatctttgatgatccaaaggatattacactgaattccaatataaaaatgatcttcaacctggcaagcaacacccttgtaaaccagcatggggacatcaaccgcactgccaaacttttaaaagacacttccaagtgcgaattcatcgtctgctccgacttatttatgaccgccagcgccaaatttgcagacctgctccttccaggagtttccatgtttgaggaggaaaatattacaaagccgtggaaatttacggaatttctgggatttaacaataaggtcattgaacctctttatgaatgtaaaacagaatatgaatggatccgggaactggcaaagcggatcgacttagaagaagaatttacagaaggccgtgattacagccagtggatgcgctatatttacgatgacctgcgcaccagagaaccggaactgccggaatatgatgaattccgtgaaaagggtatttataaatttgaagaaggtcattatcctatttcctttgaaaaagaggtaaaagacccggagcatcatccattcccgactccaagtgggaagatcgagctgttttctactaaattgtggaaaactcctatgaaagactttatgccgccaatcccccggtacgtagccccgccggaaggtccggaggacccgctgacaaagcgctttccgttgcagttatccggctggcacagcaaatgccgcacccatacggtccatgacaataacctggggcttcgcagactggacccacaaaaactctggatccacccggaagatgccgccgcccgtagcatccatgacggtgatatggttcttgtatacaatgaccgggggcaagtaaagatccctgctaagatcaccgaccgggtagccaaaggtgtcgccactctttcccagggcacctggtatacgccagacgaaaacggcgtagatacacgaggctccatcaacgtactcacctcccagagaccgactccatttgcaagagggaacggacagcatacgaacctggtggaagtgaaaaaattataacaatatacgaaaaacaggagttatccgcaaaatatcagttcggacaactcctgcttttaactgagtgctcaataaatattatctgttttataattactgttcaagacgtaagatttcttcacctttcacagcaaactctttttccaacagcgtaaacattgctccgcttgaaaatacaaccggtgataccagagattttcctgcgcctgtcacctggtccagatcaacctttaccagcacctgtccctgttttacctgatccccctgttttacttttacatcaaatccagaaccatttaattctactgtatccaaaccaatatggatcaaacattctaaaccgtcttcacgttttaaaccataggcatgtcctgtaggaaatgcagccgtcacttcgccgtcaaatggagcaattacttcaccatctgtaagttccacagcaaaaccatctcctaggattttagaagcaaatgtctcatcttctacctgatcgaccggaataatttttcctgtagccggagatacaaattctgcttttttaatctctggtgcttttttcagccagccaaataatcccatacgcacctcctgatcactttaattcaggccagtaatccttgtttgcttcaatcagatcatccaggatctgttttgctacagaagcacttggaactgtctttgataaagtaagcgcctgccacagttttaaatagctgtgttctacatatgcctgtacaaccagtttttcaactgcaagctgttcctgcatcatacctctttcaaaggttgggatttctccctggcacattggctccggaccattaaaacctacaacacaaggaacctctaccatagcgtcatcatcaaaattgctgatggcacccttattttccacaatacacagcatgatctcatgtgtattataagccagcgctcttgccagtgatacgataaaagccgcatgattatcaacagtaaactcaccgcctgtagcagttcctttgcggatgatctctcttgctgcgccaaatacttctttctccctgccttcaataacctcatctgcacgggtgtggtttggatctgtatgttctactacataatccggatacatatagtactttaagtatgtatttggtaaaaactgtggatccagggccagaagatctttcgcttttctgtgtgtcgcctgccagcttgcatccatatgctgtgtttcgattgctttctgggtaagataaccgttttcagcaacatattttattaatttaggcatataatcttcgcccgttgttttatcctttacactggtccaccagccaaagtgatttaaaccaaaatagcgaacatccagatcatcgtactcttttcctacaatgtatgccattcttcttctggtacctaccggcatatcacagatattgatcacctttgcctttggtcttaatacacggcaggcctccgcaacgatggatgcaggattagagtaattgagcatccagcaatccggagaatatttttccatataatcaataatctccagcataccggtaatgcttctcattccataagcaataccgcccgggccacaggtttcctgtccaacaacgccatatttcattgggatccgctcatccaacctgcgcattgcatattttcctacacggatatgtgccatacagaaatcctttcctgtaaacgctgtttctgggtcggtcgtatatgcgaaatgaatctgtggagcctcttctttcattaatatttcaagtgcttcacctataacagcctgacgctctgcatcattatcataaagtgttactgaattcagcggaaagtcttcctgatgttccagcatcatttttacaattcctggtgtgtaagtactgccgcctccggcaatcactacattaaacttttttccgtccatttttatgatctcccttctattactgatccaagcccagttccttgtctactgcctttcttacctgattgatctgaagaccgtaaactacctgaactgtctcatttttcttaaatacgcctgctgctcctgttttctgctttaaaacctcatccttaacaattgaactgtcttttacgatcagacgtaaacgtgtaaaacagttatctactttttcaatgttatccggaccacctaatgcctctacgatcagctttgcattgatctcccctttttcagatgctgccgttttttctgtagatgcttttgcagtcttttctttatactcagcctttgtatgaagtttcatttccattccattatcttcacgcccaagtgtttttaagttcagcttggtgatcaggaaacggaataagaaataataaataacaaattccgcaactcctattaaaagataaattggccaatgtgtctttccaattcctaacgggatattatacaggaggaaatcaataaatccatttggtccgatggcacggcagtttaatatattaaatactaccattccaagtccgcttaatactgcatgggctacaaataagatcggcgctacaaacaggaaagagaattcaattggttctgttacaccggcaataaaggatgtaaatgcagccgggatcaggattgctttgatcttctgacggttttcgggtcttgctgtgtgatacattgcaaggcatgcgccaaccagaccaaacatttttgaaagtcctcttgcatcccatactacagaagaggataagatcgggatagacggatctgccatttccgcatagtaaatatttcggcagccttcgtatacctgacctgcaatctgctctgtaccacccagttttgtgtaaagaaacggggtgtaaaccagatgatgaagtcctgtagggatcagaagccgttctagtgctccgtaaataaaaataccaaagtttccggttctgttaatgaaatatcccagactgtcgatcaccatctgcacaggaggccatacataagtaagaacaactgcaagaatgatgataaccgggatcagtacaataaatacaaatcttgcacctccatagatctggaatgcattgttaaattccgtatcaatgaaacggttatgcacatatgcacttacacatccaagaataattcccaggaatacacccatatccaggatctgaattcccagaactactgcctggccgcttcctctcaatgcgtctgcatccactaacattcctcttaatcccatgaatttattcatggcattgataaataccaggaatgcaagaagtgctgtaaatccggcttccgcttttttcttctttgcaagtccgattgcaataccagtacagaaaatcagtcctaggttattcagtatcgctaccagtgcgcctgaaaggattgttccaaatccctttgttaccggattgtcaagaaacggtaagatttccatcagtctcgcatttgtcaaaacatttcccacggcgatcagaaggcctgcaataggaaggatcagcacaggcatgaacatagcctttgaaaaggcctgcatagcactcattactttttctttcattttacctctctccattttccaacataatattcactgtctgtaaaagattatgttttttattccacgtggtgatatttggaattatacagcttactgagaaaaagtacagattttcagaccaaaagaaaacgtgttacccaattacgtaacacgtttttacccaattgcgtaacacgtttcacagaattatataaaattgtataaatacgctcttattttatagaaatgcgataatattcatagatcaaaagttcgatcatcatcattgtttttgcaaaataaagggtaggtttcatattcctgtcatctaaaggattatcatcttctacctcgatcacacaatcactttgctctttcaaaggactatcccctgcatgtgtaaaccctactgtaaaaatagagttttcttctgctgtctttacccggttcaacacatgaggtgaacgccccgatctggaaaacgcaataaaaacacctatggactccatgttattttcaaaaataccaatagaatctgccccatctgataaaatacatttaatacccaaaaccagaagtttttttcccagataatttgccatcatagaggaaaagcccataccataaataaatacagtatccggcgttgcgcagattttttctgccgccctgcgcaggttctggtagttttccaaagatacagcttcctttccggcaaaatggctgacaaaatcttcatttacctcataaccacggctgacaccgcccactgctcccagaagtttataatacatctcaataaaaccattataacccagtttacgcgaaagtctcataactgtggatgtagacgtaaagttttcccgggccactccccgtacccctaattttaaagcctgatcaagatgagtcagcagatattccaatacattccgctctatatctgtcaactgtattccacaagtcagtttctcaatgtcaatctccatatacacagcacctcttcatcttcattgcattgttcctgagtaagctaattattgtagtataccattttcattttgattttacaaattccaccagtcgctgtatacttttattttgaataaactgaatttgttgattgaatattgtaaaggacatgttgattatgaaaccatttgtagatacctgtatccgcttttttaaaaaagaaactgtattatgtgttgccggaattttagcctttatttccgcattctttgtacatccctctgccgcttatatagggtatatcgacttccgggtcctttccctgcttttctgtcttatgctggtggtggctggatttcagagtattggtctttttcattttctcggctctgcactgcttacaaaagtacggactacacggcaattaatactggtgctttccctgctgtgcttcttttccagcatgttcatcaccaatgatgtatcgctgcttacattcgtgccttttggcattatgatcctgactatgaccggacagcaaaaactgttgatctccaccattgttttgcagactatcggagcaaatttaggaagcatgttcacacctgtaggtaatccccagaacctgtatctggcctctgccttttctgtttccacagggactttcttgatgcgtatgcttccccttacagccctttctctgattttgctggttgcggcagcctgcatgcttccctctgcatctgtagacatagcttcccaaccagtagaagaacaaccagaaccgaaaaagctggctgtttacctggctctttttgtggtctgtctgggatgcgtatcccacctgatcccatatcctgttatgctggttctcgtcctcgtaactttgctttttaccaaccgggcattgttccataaagcagattactttctgcttttaacgtttgttttcttttttctgttcatcggaaatgtgcagaacatcccagcagtatctgacctgctccacaagctgatccggggacgtgaactgggcgctgggatccttttaagccagtgcatcagcaatgtacctgctgccatcctgctttcaagctttacagaccaggtcacacctctgctgtacggggtcaatatcggcggccttggaactctgatcgcatccttagccagtctgatctcctatcgtttttatgtggggacagaaaatgcgcataccgggcgctatatgaaggtatttacactttataatgtgatctttctggtcatcctggctttggtggcatggaaaattctttaaaatatacagcaaaaatccccgtctgatccgacggggataactggcagatttttactttttaatccgctttaaacaatgtcattacaaagctgctgatcttttcactggtttcccggcagaccgcctgaacttcctcactgtctgcttccgggtcttccccgcatacatccacaccaataagcgttttatccggtgtctgctgcatatacgcatctataaaatgtaaaacctgatttgaagccacatttccctgatcccagttggtctttccttcagactctgataaaatatctttatcaatggaaatatacagtggcaatggatctttttcatcggctcctaaatcattttctttgcactgtccacaaagtttctttattccatccggcttttccacattttgaagaaattcttcctcagagatccaggttactttcctgatcaattcttccccgtcttccaaaagctccctttttgtttcttccatggcagtttccggtggtcccaccagaattacatgttttaaattttcattggtctccagtgcttcccggatccagccaccgcaggataaaatgccgccaaaggccggtctctgcatatccgtatggtggtcaaatactaacagttcaaaaggttcctttaccaattccagccacagttttgtcagataatggtaattgccggagtctaaaaaatgcagtccttccggaccaaatgggacaattctctttccgatctcttcctctgccaggctatcacaatagcagttagtccccggaatgtcctggcagtccaactgggaaataatatgattatttgtttttcctgcctccagcactgcctttaggccctgcacttcgtaaactccactgaaattcatgatcacaatgttattcttcatatttaaaacctctccgtacctgataaatggccttgcaccgctttccgttctgctccaaacgcttcacagcctgcaacgcgcccccgggcgcgtttcccacttccattttaagcgaaaaaaagctgcagcttctaagaaactgcagccatttttatttcacaactattacttatttctcagcgattgcttcgatctcgcaaagaacgccctttggaagagacttaactgctacgcagcttctagctggcttagaagtaaagtacttagcgtatacttcgttgaatgctgcgaaatcgcccatatctgctaagaagcaggtggtcttgataactttgtcatagccgcttcctgctgcttccaggatagctcctacgttcttgcagctctgctcagcctgtgcagcgatgccttctggtacagtgccgtcagctggatttaccgggatctgaccggaagtataaacaataccgtttacttcaaaaccctgagaataaggtccgattgcgcctggtgctttttctgtgttgattaatttcattttcaaatcctcctttgaactgtgatgttcacatcatgtatccaatattatagccaacctttgtaaatattgcaatgtttttatacacatacatcattaaaattaagtaaaaacatacatgattattttttattaacctaaataattttgtaaaacatagtaacaaataaatttaaaagctgactatttatctataaatatactctgtgctattttgcaaatctattaactgttttatacttttaacattccaagaaggtattctctgctgttcttctccggctcttccaaaaccagttccagaaaatgatgcaatgtctgccccacttcttttcccggcttcattccggcttttatcaggtcatttccggtaacagcaagcatttttaaggaaatgcagtcaccgtctgcgcggatctcatcccgcaatgcacagatccgctctaactgccttaccgccacactttcgctatccttgtcttttgctgcctcttttgccagacacagcttaatatttaacagatcatcaaataattccggttccatctggctcatgactttacggatctgaggcttgctttcgatacctggcataaattccagttctgctgccgtttccagcgtacacatttcatctgtttttccatctggaagagcgatctccccgcaaatggatctttcgatccaaccagtcagcacctttacctggtaaatagtatcattatccagtttcagatcccgtaaaatgcgcactgactgctccggtgttccttttcttaaaaataaagcccaacgaagggccttttttgcaggaacagtaatcggcatatctgcaagcatttctcccattttgtgaaatgtttcagaaacataggggctgatgcctgtttcatataccagcttcatagtctgtggccggtcacttaaaagcagcttggtcagttccacctggatacgttctttgcttacgtggatcagatttggagcgatttctgtgatcgcctgccgtgtggcatcttcgatctcaaatcccagctgggcagaaaaacggatagcccgcaggatacgcagggcatcttctgtaaaacgttccgttggatttccaacgcagcggatcactttacggtcaatgtcttccctgccgccgaaaatatccaccaggcctgtattgtgattataagccatggcgttaatagtaaagtcacggcgctttaaatcttcttcaagagaaggggtaaaagtaacagtatccgggtgtcggccatctgtataatcgccgtccacccggaatgtagttacctcatatccctcttttccaaccataatggtcacagtgccatgctgtatgcctgtatccagtgtcctggtaaagagagccttgacctgctccggtctggcactggtggtaatatcccagtctcccggctctcttttcaggatcatgtcccggacacagccgcctactacataggcctcgtaaccatgttcatttaacctgtcaatgatctttcttgcaggttccgggatattcattttcatattaatatgcacgtccccagtaaaccatcttcttagctggctttccgcagcatacacacttgtcagacagagtttcctgctcaaatggcatgcatctggaagttgcgccggttacttccttgatcttgtcttcgcattcctggcatccgcaccacatagcctttacgaaacctggctttgtgttaatggtctcaacgaactcatcccagcctaaagcggtataagtgtgggcatctctgtgctttcttgccttctctaacatgtcatgctggatggtatcaagcagttctgctgcctttgcttctaactcgtccagggaaacaacggtcttttcgtgggtatcgcggcgtaccagaacagcctggttgttttccatatcctttggtccgatctctactcttaacgggataccacgcatctcgcagtcagcaaacttccagcccgggctcttgtcgctgtcgtctacctttacagagaagccggacttgatcagacggtctcttaactcgaatgccttgtctaatacgccttccttcttctgctggatcggaactaccatgatctgtacaggagcaattcttggaggcagtaccagaccattgtcatcaccatgtaccatgatgatagcgccgatcatacgggttgtcataccccaggaagtctggtaaacatgctttaatgtattgtctttatcagtaaactggatatcaaatgcctttgcaaagccgtcaccgaagttgtggctggtaccggactgtaatgccttaccatcatgcatcagggactcgatggtgtaagtagcctctgcacctgcaaatttctccttatcagtcttctgtcccttgataaccgggatcgctaaaacctgctcgcagaaatcagcgtatacatttaacatctggatggtacgttcctctgcctcttcagcagttgcatgagcagtatgtccttcctgccataagaactctctggaacgaaggaatggacgggttgtcttctcccaacgaacaacagagcaccactggttgtatacctttggaaggtcacggtaagaatgaatgtctcttgcatagaaatcgcagaacagagtctcagaagtaggtcttacgcaaagtctctcctgaagtggctctaatccgccatgagttacccatgcaacttccggtgcgaaaccttctacatggtctttttccttctctaacaggctttccggaatgaaaataggcatgtatacgttctgtacacctgtctctttaaatctacggtccagttctttctggatgttctcccagatcgcatatccagctggcttgatgaccatacagccctttacgcttgcataatcgcacagctctgcttttttaaccacatcggtataccactgggcaaagtcagtgtccatggatgtgatcgcttctaccatttttttgttgtctgccatgatttttctcctttttatttctttctttttaaaccatgtactctcggaacctttttgtacttgattttgcgagaagattttttgtcagttgtgcccagatttctgaggcgtacgcggggcgtacgttgatgaaatttgggcgcgactggcggaaaatcagccgcaaaggcaagtgcaggaaaggtttcgagagtacataaaatcaaaagagccatccgatcccatgcatcaacttactgcaagggaccgaatgactcggcggtaccacccttcttagttcctgcaaaaatgttgaggcaaatgacattttacctctgcagaaaccctcttgtttatcctctaacgcaggaaatacgctgcatttatcatacagagctccagggcaggttgggtcacgctttcgtaaggaacttccaccagtgttcctctctctgtaacgggctgtccgacttaatgatccccttcaacgccattttcatggaatttcatagatcctctttgatttacgtcatttcctttcgattttacgccagaacgggatttttgtcaatgggacataaaacggttaccaccgtctatcatagctgacttatttgtttcattatgcctctgttcatcgttcataggctgcgtgatcaataattctgtcatatcctcgatcagcaacaatcccagcggccccagaaacagccctgctatcccaaacagtttcagtcccacatacactgcccccagtgtctcaaaaggcgaaagccccatctgtccactcataagatgtacttccaggaactgccgcataaaagtacagatcagatataaacctgttaagatcaatgctgttttccagcttcccatggcaatctcaatgaccgcccacggcaccagcaccgttcctgttcctaataccggaaaggcatccatgataccaatccccattcccacaaggacaggacatggatttcccaccaaaaacatgcctattgtacacaaaaatgaggtaagtaaaaatatgatcccctggcttttaaaccacactttcccggtgcttaccagcctgtcaccgatcagacggaactcccggctgaaaacagaccggtcccgccgttcttttaactcttccatttcctgtaagcttaaaatggcgctgcagaaagaaaacaggcttataaatccaatacgacctataactccggctgtataataagagccagccatcaaggacggcaccgatttctctttcacatactttgttcctgcttcgatcatacttcctgccacatggattccccagccgggatcaaggccgaaccgcttctcaagaccggaacatttttcctcgatccagaaataaagcccatccagccatacaggaagctggttcatcaaagtagacgtttcttcccacagacggcggatgcccaaagtcagcagaaaacttccaagcaccgctaagatcagtaactgtaccgatccgatcagtcccagtgatggcttccatttttttccaaatatacgcactgtaatccggtgctgtaaaaaccgggctgacggccgaaggagcagtgccagtgtataacccaataaaagaggaaccacaagtggcagcaggtatttaagacctgcatacaccattcctgtgattcctgttataataaaaaatttcttcagtttctttcccggtttttccatggactcacctgttttttgatctgtacttcctttgtacattcttattatgagtcttatggacgggaattattcacggtctttaattgcattccgatatttttctttttccgttatacggtttctttttcgccatcttccggcttttcttcatctttgcacacatcttccagatatgccagagcagctcttaaacagccgtcaacgccaactaaactgctgtccacgcaaagatgataattctgggctcttccccaggtatttccagtataatactggtaataatcccggcgcttgcggtcaacagcacggatcttcatttccatgtctttttcgttgatgccttcttccggttccagttccatcagacgttttatgcgctgtttcatttttgaatatatgaaaatgttcacgctgtcctccaggatcatatctgcgcagcgtcctacgatcacacatgggccatgagaagccagtctgcggatcacattggactgggccacaaagatctggtcagacataggcactttatacaactccgaaaaagaatgatggatcttgtgatccaaaggatcgtcctcgatcacatgctcatcatatttgcggaacgcttcctctgcaatattaatatcatctgctgccatggagatcagttccttgtcataaaagggaatccccagcgcctctgccagcttcacacccagttctcttcccccgctgccgaattcacggctcactgtaatcaccttgttcataatacttttccccgcctttctccttggtaactgctgtgctgatagtatagcacatttcccgggaaaatggggttaattttatcttaaaccgtataagtggatcagtgttttcaaagcggcataggtgtccgtgcgattagaataactgccaaaacagcacctgcaaacgccgcagcagcaacaactgctatcactttcctgctgagtttcttctttgctgccttacagatcagcgcagcacaagccacacagacaaccgcagcagccatggcgatacccatcatctcccataaccaggataactcgtataagagtctcatacatttcccctcaccttctgttgatcaccgcaaaataccttttgccacaacatcatgataataccatagccaaaaggccagaaatctgatgcaagcctgcttgcaggaagatttctggcctcaggacaccggtacatcgttttcgtaaataatgtaccagtatcataacattttgacgttgctgtgtaaacctgtaaattttacaactcattcatttgttttttatataaacactacttattaaagcagatatactcaattcccacgatctcgcagaacatcttcagaaccttcgcatactttccataaaccatatgcagatggttggagttgatcttctcgtagaacttttcgtagtctgcctctgcttctacgaatgcatagggataacagtatgtagtctcttttaacttctcaagaggatacatctttgtggttccttcaaagcagcctaatacatatttcccattgctgcggaacagtctggcaaccgttacatcacctggtttggagataaactggatggatgcaccacctgcttctccgaagatatgaggcattaaagcgatcttcttcatagcttcttctttgttgtccggatcagcgaaatatggtgccacgctgccgcagtttgccagtacaaattccttatcgtttccgtcaaagaacttgatgtccagcaaacaggaaggctttccttctgcgcacagatttaagatgcgcatggtcatagcaccatcgcagtcacactcgcaagaggtaggaatcggtgtcttttcgccgtctgcgtcatatgggttgtttaataatgccacgcccagacactggagaacaaaatggtcactcatatcctgctggcacttgatgcccatgaagttatatttcttttccgcagccatatcctttaacgccagataactgcgtacctgtaattccagtgttttctctgtaaacttgtcaccgtattcgatcctcgggacattttcctttacccactttaaatgcttctggacacgttcttcgtccagtgcctttgcacggtatacgatctcatactggtcgcagtggtcaaactctaccccaaaggtactctgccactggcttggatctgctaccgtagtcccaataccaatacttcttccgccgatcattccatagctggaacggcgaatgccttctgccacataaacaccttttacaaagttatctaccttttcctggatctgtggatcttcataatcacctgatacacggatacacttctttccggtctggtccaacatacccccaactgccagcagtgttacaaggctggacgtattgcgctgcaaatttcctaacagcagcaccggataggaagttccataggcaatgcggaatgctaaagatggggttgcccagataggcacatggatgatcacagcttcaatgccctgtttcttgatctcatcagaaatattctgtccatcttctgtgtcaaatacaataggtgagatataaaggtcatatttatccccaaaggccttttttaccttttcaatctcgcttgctacaattgcttctctctttttataaaattcgcgacggctgtcacctaatgtgacgatcgctaccttctttttctccatgagaaatccctcctttagaattacatgttaaaaccactctggcttaataagtttcggtaatgcaaaggcgatatccggtaaaaatgcgatcagcactactactactacagaaaccatgatatacgggataacagccttaaacgacttttgcacactcattccggaaatccttcctgcgatcagcaaacacagaccgtaaggaggtgttacctgaccaactgccagtgtgataacgatgatcagacctaactgtactggtgtgatgccaaatgcggttgcaacaggcattaatacaggaacgaacaggatcattgcaggaatagcatccataaatgttccaaggaataaatagaatccgatcacagccagcaagaactgccacttatatgggaagtaggtagcgaacatctgctgaacgctggtacttacattgtagtagcttaaaagctgtcccaaagcatttgcggttgccagagcaaacagggaagtggcgctggtacgcagtgtgtcataaagtaatggttttacatcttttaaagaaaggttcttaaatacgaatacaccaaggatgatcgcgtagatacatgcaatcgctgcggactcagttgctgtacacaggcctccgataacgccgccgataataataacaggtgttaatactggaggaagacattttatagccagctttaaaaagtctttaaatgacattggatcctgttttggataatgatatttcttatttcccatgaaaataacaaacatctgtccaagaccgatcaggataccaggaacaacaccgcctaagaacagagcgccgatggatgcgcctgctacggaagagtaaacgaccataggaatagatggcgggataacgataccgatggtagaagaagccgcagttacacctacggaagtttcctgattgtaaccttcttcctccatagccgggatcagaatagaaccgatacctgctgtatcagcctgggaagaaccggaaattccggcaaataacatagatactaatacatttgcataggcaagaccgcccgggaatcttcctacgataccattacagaactggatcagtttctcactgatcttagcacggttcataatgtttgctgccagaacgaacagcggaactgcaagcagtgtaaagctgttcaggccggtaaacattttctgtacaactgtaattaaagaaatagaatttaactgggaaataccaaggagtgccaccagacccaggatataggcaatggggatcctgcgggagtatcctaaagtttgtgtaaacctccaaactgatgtaagataaaattactcagtttggaggttatttttatggcaagaagaaaagacagcccacaaaaagctgcaatgagagaaatgatgcgtgactatctgaaaaataatgatatcagcatcaaagatggcaccgatgttaacagcatcatgcgtgacatgatgtctgtcattttggaaggtgctttggatgaagaactggatgaagaattaggatattccaagtatgactatcgaaacaaagaaacagacaatagtagaaatggacattccagcaaaaccatgcacaccagttatggagatatggatgtggcaatcccaagggatcgtaatggtgattatgaacctcagctgattaaaaaatatcagaataccgtaactcaggacatggaagaaaaaatactttccatgtatgccaagggaatgacaactggagacattgaatcccacatgcgtgaattatacgatattgatatttctgacagcacaatcagccggatcacagacaaaatcctgccgattgtaaaagaatggcaggaacgccctttggaagaagtgtatgctgtagtatttatggatgcaatccactatcacgtccgcagtgaaggacgtattgtaaaacgtgcggtttacattgcccttggtatcgatatgaatgggaaaaaagatgttcttggaatgtatgttggagaaaacgaaagtgccaagttctggctttctatcatgaatggattaaaaaacagaggcgttgaggatatcctgattgcatgcgttgatggtttaaatggatttccacaggcaatcgaggctgtttatccaaaaacagagattcagcagtgtatcatccatcagatccgtaattcaacgaagtttgtttcatacaaagacatcaaaaaactgatggctgatctgaagcttgtatatgcagctccaacggaagaaacagctttaaatgagttagaattgttcaaggataaatgggattccaagtacccaaaaatctataaatcctggcatgataactgggcaaccctgtccacttatttcaaatatccggaggcagtaagacggctgatttataccacaaatgccattgaaggattcaaccgccagctccggaa

SEQ ID NO: 3625 - DNA, 423 bp, Unknown
  gut microbiota DNA sequence
tgggcaaccctgtccacttatttcaaatatccggaggcagtaagacggctgatttataccacaaatgccattgaaggattcaaccgccagctccggaaagtgactaaaagcaaggcggtatttccgtcggatgacagccttttgaaaatgctgtatctggcaaccatggatatcacgaaaaaatggaccggacacaggcaggactggggacagatccattcccagcttgaaatttattttgaagaacgtctggcagggcggaacctgtaaagcagtcaattttaggcaggttttattgacatgcctaaaaactactgtataatgcagatatgggcagaatccggaaaatcggctctgcccattgtaactattcacaaatcttatatcagtttttaacgtttacacaaaacttgaaacggtctc

SEQ ID NO: 3626 - DNA, 253 bp, Unknown
  gut microbiota DNA sequence
gcctgtacgaagatgtgggtaggacgctcacatccctgagcttttaactgttcaccagcttccattgccatggtgccgtatccctgcatgatccatgccgggatctcttcgtagccgtcccaggcagtatcctgtacgataacgcctcttggagtttcatccgcttccttagcagccagacgaacacagtcatcatagtttaattcctggatgtctacctgagcgccttcttttgcgatattctgaagacggg

SEQ ID NO: 3627 - DNA, 151002 bp, Unknown
  gut microbiota DNA sequence
gagaaacgcatagccgagttatccgctatcttcaagcggctgtatgaggacagcgtgaccgggcgcatatcagacgagcgtttcacagaactgtcggcagactatgaagcagaacaacgggagctgaaagaaagagccgctgctatccaagcggagctttccaaagcacaggaagccaccgtgaacgcagaaaagtttatgaatgttgtccggcggcataccagctttgaagaacttacccctactctgctgcgggagtttgtagagaaaatcgttgtgcatgagtgcagctatgacgagaacaagacccgcagacaggacattgagatttattattcttttgttggcaaggtggacttgcccgaataaccgcccgacctatccgacacaatgcgcaagtgccggataggaacggcaaaattttttacacttctattacttctttatcgcacatcagtaaaatccccggagatctttggtattaagatcaccaagctggcagcttccagcaaaggcggttacatcctgatcctgttcttgatcgtagcagcagtagcatttttcgcatggaaaacagaacattccaggataggctatgctttttcagccatcagggaagatgagatcgcagctgttgccatgggtattaacactaagtattacaaggtacttgccatggtgatctcagcagtgatctgcagcattgcaggaagttttcaggcagtgtttgcaagcatggtcagcccggagcttttaaactctaccaagtccatttccattcttactatggtagttatcggtggacgcagaagcatcaaaggtatgatcttaggaggtatccttcttaccattcttcctgagttattccattccgtaaaagacattgcaggacttccatttgacccatggatgatcctttacggcttccttcttgtatttatgatgcgtttcagaccgcagggcatctggggcgtgactaaaaaggaaacagcagaagtggaagaggggtgatggatatgctgcttgagacaaaaaaagtaacgaaaatattcggcggacttcacgccaacagtgatattgatttttccattgatgaaggcgagatcgtagccatcatcggaccaaatggttcaggcaagactacattttataatgtacttacaggaatttcccctgcaaccagaggccagatcattttcaagggcaaaagcatagaaaaaatgcagccggaagctattacccgccttggcatggcccgtactttccagaatatccgtctttttggaaatatgacagtagcggaaaatatcattattgcccgccactgcagaagaaagaccggtatctgggactctttaataggaagtccaagacttaaaaaagaagaggcggaaaaccaggaatacattaagaaatgtctggaatacgtaggtatttatgataaaaaagactggctggctaaaaatcttccatacggcatgcagcgccgactggagatcgccagagtcctggcaacagagccaagcctgatcctacttgatgagccggcagcaggcatgaacccacatgaaaaggatgagctggtggagatcatcaatcgcctgaaagcagagaaatattccattatcctcattgaacatgccatgcgtatggtcatgaatattgcagaccgggtggtagtatttgaccacggacagaagatcgcagaaggactgccacaggatgtaaaaaatgatcctgttgtgattgagtcttatctgggaaagggggcatctgcaaatggcgatgcttgatgtaaaagacctgaatgtatattatggcaagatccatgctattaaaaatataagtcttacagtagaagaaggagagctggtctccctgatcggggcaaacggcgcaggaaagacctctcttttgacggctattatgggccagatcccgtctacaggccagatcagctttgaaggccaggcagtccacggaaacggaaccatggagatagtaagaaacggtatgaccatggtaccggaaggcagacgtgtatttccaagaacttctgtaatggacaatctgctgttaggcgcttacagccgtaaggataaggaaaatgtaaaaggcgacttaaacaagatctttgaaatgttcccaagactgttagaacgtaaaaaccagctggcaggcaccttatccggcggcgaacagcagatgctggctatggggcgcgcactgatgtcaagaccaagacttctgctccttgatgagccgtctatgggactttcaccaagactggttgaccaggtatttgataccattgtttctattaataagtcaggaaccaccattatgctggtagagcagaacgcaaaccaggctcttcgtgtggcaaaaagaggctatgtaatagagacgggtgagatcgttctttcggatgatgcagataagttattgtccaacccgcaggtgaaggaagcatatctgggtggttaaaacacgggagtaattggaaaaatctggaaaataccacttgaaaattgcaatctgggaaataggatctggaaaggcgggagcaaaggtgaaagtactggtatggtgtgctactgcagaggactgcagggtatttgaacagtataatatgggaagaattgagtttgaatatactccggatacattaacagaggaaaatgtttcctcctgtaaaggctatgaagggatcgtgatccagaccaggtgcatgatcacggaaaaggtagcagcccttttggcagaggcaggagtaatatttatcgcctgccgttccgccggttttgaccatgtaaacttggcagccataaagaaatatggcatcaaggcctgcaatgttcctttgtattctccaaatgccattgcggaatacgccgtcatggcatctatgatggcgctgcggaaggtaaaaaagcagctgcacatgacagaaaaaggagattataccttaaaaggtctgcgcggccaggaactgcgtgaccagaccattggtattatcggaaccggccggatcggcatggaaagtctgaaaatattttcctctttcacaaaggatattttactctacgacccttatccaagagaagacgcgaaagcaatgggaatctatgtttctctggatgagatctacgaaaagtcaacactcttagtatttcactgtccttttacaaaagaaaatttccatatggtaaatggtgacagcatccgtaaaatgcgcacaggtgtggtccttgtaaacccggcaagagggggactttttgatcatcaggctgtattagagggcttaaaagaaggaaagatcggtgcccttgcaatggacgtttacgaggatgaaaaaaattatctgcgtaaggacctgaaaggggaaagtacaggtgatgctgtatttgaccagcttatttcaagagaagatgtgatctatactgcccatactgctttttatacagaccgtgcgatctttaatatgatcgagaccacagtggaaaatctctgggaatacggacagacaggaagctgtgctcatgaactgacctaagagagcgtttacagggataaagggtacaaaatcagggaaaagagggacctagatatggaaaaagagtttgatatattaacgggtgcaaaacgactggatgaagtacggttttccaagattcgtacagtaatggatatggtagctgaccttcgtgccaaaggggagaaagtgctggcattaagcgccggagaaccggattttgacacaccggcccctattaaagaggcagtgatcaaagccttggaagaaaattatacccattatggctccaacagaggctatccggctcttagaaaacttctgtcagagaaactggaaaaagagacaggggtttcctatgatccggagacagagatcattttcaccaccggcggtgcagaagccttaaacaatgcctttatggcagtggtagatccgggagatgaggtgatcgtattttcaccggcttttatcacctatgaaaatctggtccatatgtgcggtgcaaaactggtaaaagtgcctttaaagaaggaaaataactatcagatcgatatggatgatctgaaggctgctgttacagacaagacaaagcttctggtgatgaacaatccaaacaacccaacgggcgctgtttacagcaaagagtgcttagagcaggtatgtgagctggcaaaggagaagaacttcctgatcctttctgatgaaatgtattccagactggtgtatggagacggaaaattctattctattgcctctttcccggatatgaaggagaggaccattatcatcaatggtttttccaagacctatgcaatgaccggctggagagtaggctacgtggcagctcctgcaaagcttctgccaagtatcttaaaggtacatcagtactgcagcacctgttgtcctacctttatccatgtgggtcttgcaaatgcactggacctgccggaaacagaagaggcagtgtgcaaaatggtagatgcgtttgcaaagagacgggaagtgctgattgaaggactggatcagatcccgggaattacctatgtgaagccggaaggcgctttttatgccatggtggatgtatccgcttttggggtagacggagatacctttgcagcaaagcttttaaaggaaaaacatgtggcagtgatcccgggctccggtcttggggagaactgcaaggacgcagtgcgtatttcctttgcagcatcagaagataccataagaaaggcaacagcgcggatgaaagagtttatccaggagaaagcttatgaatcttagtgcagtgattaaccttcagctggtgatgtttgccctgtttatctgtggctttatccttacaagaaaaggagtcatcaacagtgagcggcgaaaaggcatgtctgacctgctcatcgatctgttccttccggcaaatattatctgcgcctttctgacgggcatcagcagggacgtatttgcagaggcctttcaggtgcttgtgatcgctcttgggatccagatcatttcctatctgttgggactgatattatataggaaggaagtaaacgggcggagaatggtcctgcgctatgcaactatctgttccaatgccggatttatgggaaatccggtagtggtagggatctatggttcccagggcttactgtatgcttctgtttatctgatccccttaagaatctttatgtggtctgccggtctttcctgctttacagtggcaagtccaaaggatattgtaaaaaaactggtccatcatccctgtatcattgcagtagttatcggtatggccctgatgccatttcctgatgttgttccaagtttcctgcttcagaccatgcagtcctgcagcaaatgtgttcttcctgtttccatgatcgtcattggaagtattttgtcggaagcagatatccgtaaaatgttaaagggaagcaccttattttactgtgtcgtgcgccttctgggaattccggctgttaccatggtcgtatgccgtcttcttggaatgggggcgctggtaacaggtgtatgtaccatcttagcaggaatgcctgcaggaagtaccacagcgatccttgcggaaaaatatgacggggatgcaaaatatgcttctgaatgtgtctttctgtctacggtactttccctttttaccatgcctcttttgtatatgatactggcctgaatatttttgctgaactgtaacgaaatagtgcacaatagcagccggattgtaattagttaaaactaacaaaaataaagaaaactgcctgccagctctgacatttttcgaaaaatcgtgctaaactgaaacaggaaactgtgaatgtgaagcatgagaaaatctgggaaagtctcagatacaaaagaaagcaggcaaaattttatgtacgagaaaggacaatatattgtatacggcatccgtggagtctgccaggtagcagacattatcaccattgatcatcccatcgggcccaaagggcgtctttattatgaacttcatccctataatcagaaggatgggaagatcgtcacaccggtagactcggagaagaccattactaggctgttgcttaccagaccggaggcagaggcgctgatccaagagatccctcagatcaaagaaatgaccgtggcaaatgacaaacagagggaagaacggtataaagaggctttaaaaacctgcgactgccgtgtatgggtgagtatgatcaaggcgttgtatctgcgaaaacaggaccggatcgagcacaagaaaaaggtgacggatctggatgagcggtattttcgcatggcagaagattatctgaattcagagctttcccttgcacttgatatatctaaggaaaagataaatgaatatattaaagaacggatcgtggtgtgaaagccacggtccttttttactttatagaaaagaccgcctgcgttagcaggcggcaatttttatattcggatgatttattcgatggtagttccggcttcgccagtcaggctttcttctgccttgtccagagaagtgatgatcgccttacggccttttcctgcctctaagaagtttacagaagcggaaacctttggcagcatggaagcaaattcaaactgtccctggtccatatatgcctttgcttcgtcaatggtcatatgatggatcggctcttctttatcagttccgaagtttaaggtaacattgtcaacgcttgtaaggatcatcataacgtcagcgtcgatctcttttgctaaaaggccggttgccaggtctttttcaataatggcactggcgcctcttaagttatatccctgttccataaccgggatgccgccgcctccgcaggcgatgacgatctggtctgcgtccattaaagccttgatggcgtcgatctcaacaatggcaactggatgaggagaagctacgatacgtctgaagccgccttctacggcttttacatggttgccctttgcctcttcttcttttgcttcttcttcgctcattacacggccaactacttttacaggggtgtaaaatgcctcatcgtaaggatctacggttacctgggtaagaacggtgcttaccggcttgtagatgccacgtttgatcagttcagcgcggatgccgttctgtaagtcatagccgatatagccctggctcatagcggagcatacagacataggagcggagctgtatccgtcgtgctgcttgccgaattcattcattgctgtgtggatcattcctacctgtggtgcgttgctgtgaacgatggcaacctgccagccgtcctggatgaagtctgcgatcacttttgcagtgcgctttacggcttccttctgttccggaagattggttcccatatctttatggccgatggccatgacgatcctcttttttgccataatgcttacctcacttttcaggaaatatttttaacattatgatacattattatgatgataattgcaatgaaaagcgaaaaaagatgatagcaaaaggttgatggctgtgctatactgactgcatgtgtgtaaggcggaaaaaagagaatgtgaatagaatgaggatcttgccggaaggcttcggatggaaggttctggcagccatggcagcagctgtggctgggaatatcctggtgcagtacgtgatcccgtggccggattttatgaaggcgtcttatggggctgcagcagagatactgggggattatcctgtgggagtttatctgcttttgacgcttcttatagcgcctatggtggaagaagggatatttcgcagagggatttatgcagtctttagaagatggcttggtgtgactccggctgcgtttttatcagcacttgcatttggtctgtatcatgggaactggatccagggaatttatggttttgtttttgggctgcttcttgcctggggatatgagagcagttcttttggaaagtacaggatggttgtgctgatgcatggggctgccaatggggcggcggtgctttgcagtatggtttttagtggcttattttaagtaatgatgaagtgtagataacagcaaaataagaaagagaagcgaaggaggaagaacgtgaagttattatccattgcgattccatgttataattcagaagcttatatggaacattgtatcaatacactgcttacaggtggtgatgaggtggagatcattattgtagatgatggttcacagaaggatcgtacaccggaaattgccgatgaatatgagcggagatacccggggatctgtcgtgcaatccatcaggaaaatggtggacatggccaggcggtaaatacaggtcttaaaaatgctacaggtgtgttttttaaggttgtggacagtgatgactgggtcaatgaagaggcataccagaaggttctggaaactctgagaaagtttgtgtatggtcaggagaccattgatatgctggttaccaactttgtctatgaaaaggaaggggcaaagcggaaaaaggtgatgaattatcatactgcttttcctaaggataaggtgtttacctggaaggacgttaagttctttatgacaggacagtatatcctgatgcattctgttatttacagaacagaattgctgcgtcagtgtggattggaactgccgaagcatacattctatgtggataatattttcgtgtaccagccacttcctcatgtaaagaatatgtattacctggatgtgaatttctaccgctattttattggaagatcggaccagtctgtaaatgagcaggtaatgatcggaaggatcgaccagcagctgcgggttacaaagctgatgctgggatattatgatgtgacgaagatcccgaacagaaagctgaagcattatatgacttcttatctggagatcatgatgacgatctgttctgtgctggctattaagtcggggacagaggagaatatggaaaagaagaaggaactttgggagtctttgaagaagcagaatttggctctttggctgagattgcggtttggatttttgggacagggatgcaatctgccgggtaagggcggtagagagttgctgatcttagggtataagattactcagaagttctatgggtttaattaatccccccacggacaatcgagaaattaaaaatctggggattatctcaagaatataaaataaaaaggcgcttggtgttttagccaagcgctttttctgttatcttcttgtcttcggtgtcggttgcgtatccgtatactaagtagtggatggcataggacatcaggaaagcaccgcatacatcgatgatggagtgttgttttaaaaacatggttgccagacagatggaaatggtgagaagcagtgatcctaaccgcaggaagcgatattttgctaagatctggcttctgctgatggcaatgtgggttcctacggcattgtatacgtggatgcttgggaagacattggtgcaggtgtctgttttatagagggcagctacggctgcgctgaaaatgttcttgttcgggtcgatcaccgggcggaagtcggtaccgttgtggaagaaggtacagatgatcaggctcagggtcatgccggaaaacaggaatgtacacattttgtagtagtcttctttgctgcggaacaggaagaaaaccaatgttcctgctacgtagagaaaccacaaaaggtatggtatgatgaagtattcattaaatgggatcaggtcgtctaaggacgcatgcatgatgtgataatcacgggtgactgtccgctccaggtacatgaaccagggcaggtagatgaatgcgtaggacagcagccatgcatgcctgtatttgtgtaaaaattcgcggatctttttcatagtttcctttcttaatcctatatagtatcaaacaaattttgaaatagtgtttacattgtttcttttttatcgtggagattatagcacggtaaattttgaaaaacaaggggagtcaggaaatattaataaagttctcttctatttttatttttgttatgatatatttattattaagaaataaatttacatgagattggtggcgtgagaaatgagtgaagcacgaagcgttctgggagtgatctgttctgcctatgacagtttttttgaagcagagaaaaagatcgcggactatattatggaacataaagagcaggctgtggatatgacagtgggagaactggcaaaggccagcggtaccagtgatgctactgtgtcaagattttgccgcagatgtggttttaagggatttcagaacctgaaactgacacttgcaagagagattctggaggaagagcatcagagccaggaagtgaccaatgatattgacaggacggatctggaacagtctttaaagaacattcttgcgaataaaattgcggaactgacagagactataaagatgatggacattaaaaatctggaggttattctggataagctggagcatgcaaggatagtgcagctggcagctgtgggaaatacgatccctgtggcattagacggagcttttaagctgaaccagctgggtattccggcagtggcaggggatatctgggaagcccaggctgcgtatgcttttaatctggggccggaggatgtggttttgatcatttcaaactctggttcctccaagcggttggagacgctggctttgggagcgaaggaaaatggaagtaccctggtgcttattacgaataacagggagtcaccgttagcacagatctgtgattataagatcattactgctaccagggaaaaacttcttacagaggaattctggttttccagagtcacagccactactgtgatcgagatcatttaccttcttttgatggcgggaaagaaggatgcggttgagcatatcagacgtcatgaaaaagctatattatctgataaacagaggggatagatacacaagataatatatcaggcagcacctaacaatctgcacaaaagagagtcgcattttacagaaaaatgcggctctttttatctaaagtgctgaaaattagtgtgaaattaattttctcaaagaacaccattgacgaaaaagaaaaatcatattatagtaaagccataaggataagaaataaaatttcttaaaagtaaggagaagtgacgtatgatttacacggtaacttttaatccggcactggactatgtgatctctgtggatcattttactccaggtaagatcaaccggaccgtatcagaaaacatgatctgcgggggaaaagggatcaatgtatcggctcttttagcaaatctgggttatgagagtacagcactgggctttgtagcaggttttacaggagctgagattgaaaaacgggcaaaagagttggggtttgcatcagatttcatttatgtaaagaagggcatgtcccgtatcaatgtgaagatgaaatcggatgaagagacagagatcaatggcatgggaccagatatccagccggaagatgtggatgctttgtttgagaagctggatggcctgaaagatggggatgtgctggtactttccggaagtattccttctatgatcagtcatcatatttatgaggagatcatgaagcggctggaggacagaggtgtacgtatggttgtggatgcggaaaaggatctgctgttggatgtactgcctttgaagccatttcttattaagccaaataatcatgaactgggtcagatgtttggaagaaaattgaagacggaagatgagatcatagagtgcgcaaaggaactgcaggaccggggtgctgtaaatgtcctggtttctatggcaggagacggcgcattgctggttgcagaagatggacatatttataaggaaggtgtctgcaggggaacagtgaaaaactccgtaggtgccggtgactctatggtagcgggatttttagccggttatctggaaaaaggagattatgagtacgctttgaagctgggaacagccagtggcggcgcaaccgcattttcctatggtattggtacaaaggaactgatcatggagttgttaggacagttacagtaagcttacgatgaaataaaatatgggcatgaaaaagcagattgaaatatagaaggaggtatacacatgcgtattacagagctgttgaaaaaggaaagcattgaactgggcgtgaaagtggcagacaagaacgcagccattgacaaactgatctcactgatggatgctggtggacggcttaacagtacacagggatataaggaaggaattttagcaagagaggcacttggaagtacagccattggtgaaggaattgccatcccacacgcaaaggtagaggcagtaaaagaaccgggacttgcagcaatggtagttccggaaggcgtggattatgaggcatttgacggctccctggcaaatctgatctttatgatcgcagcaccggcagcaggagatgatgtgcatttacaggcattatccagactgtctaccttattgatgaacccgggatttaaggagagcctgatcgctgcaaaggatacagatgagtttttagatatcatcgacaaggcggaaaatgagcgctttggcgaagaagagaggaaaacagaggcagctgcagaaaatgtgacagaggataaggctgtggaacagaaggtagatgatggggcagaaaagagtgcttcggcggttaatgcacattaccgggtgttagctgtaactgcctgccctacaggtattgcccatacgtacatggcagcggaaaatctggaaaatacaggaaagaagctggggatttccttgaaggctgagacagatggctccggcggtgcccagaatgtgctgacaaaagaggagattgcggcagcagaggcgatcatcgtagcagcggataagaacgtggaaatggcccgttttgacggaaagccggtgatcatggttcctgtagcagatggtatccacaaggcagaggctctgatcaaccaggcagtaagcggaaccgtaccgatctatcattactcaggagacgcttccggcgcagcttctgaaggggagaatgacagcgtaggaagacagatctacaagcatctgatgaacggtgtatcccacatgcttccatttgtgatcggcggcggtatcctgatcgcactggcattcttactggatgattattctattgatccatccaattttggtaagaacacacctcttgcagcttacttaaagaccattggtgagcaggcatttggcatgatgcttccgatccttgcaggctttattgccatgagtattgcagaccgtcctggtcttgcagttggtctggtagcaggtctgatcgctaaaatgggttctacttttgcaaatccggctggcggagatgtaaacgcaggtttccttggcgcattatttgcaggttttgcaggtggttacattgtattaggactgaagaaactgttttccaaacttccaaagtcactggaaggtatcaaacctgtgttattgtatccagtgatcggtattttccttgcagcagtcgttactacctttatcaatccatatatgggcatgatcaatgatggactgacccacttcttaaatggaatgggcggaaccagccgtgtcgttttaggtatgatccttggcggcatgatgtctattgatatgggtggtcctttcaacaaagcagcttatgtattcggaacagcgcagttagcagaaggaaattttgaagtaatggcagcggtaatggcaggtggtatggtgcctccgatcgcgatcgctctttgcactactttctttaagaagaaatttacggaaaaagagcgtcagtccggtgttgtaaactacgtaatgggtctttccttcattacagaaggcgctattccatttgcagcgcaggatcctcttcgtgtaatcccgtcctgtctcatcggttctgccattgcaggtggtctgtccatggcatttggctgtacgttaagagcacctcacggcggattattcgtactgcctaccatcggcaatccggtgatgtatctggcagcagttgtgatcggagctgttgtaggttgcttaatcctgggaattctgaaaaagaacgtggaagaataaaatattgcatcttcccctacatcgcaggggaaagcagatatatacttaagggagtattttacagcagcccggccaaggggagaaacggccgggctgtttttgcgccaggacacattctttgtatatgaaaaagccatgaaaataaatggaaaaataattttcaaaaagtgttgacaattcctacaatttgaattatactattcaagcaatcgcatttgagacaaatgtgaaagcggatacggggtcttagctcagctgggagagcatctgccttacaagcagagggtcacaggttcgagccctgtaggccccatccaattaaataattatggcggaatagctcagatggctagagcacacggttcatacccgtggtgtcgagagttcgaatctcccttccgctactgtatggggtcttagctcagctgggagagcatctgccttacaagcagagggtcacaggttcgagccctgtaggccccatccaataactaaatatggcgagatagctcagttggctagagcacgcggttcatacccgcggtgtcgagggttcgaatccccctctcgctatgaaaaaagcaatttgcgtagtgcagattgcttttttgctatatacaaatatacattggcaggtcactggacgagcagttcatagacggtgacataaggggcatttttaatagaaattttcgatgcgttttatattcttttcggtaccattatgctataataaaatgagcacagaaaaacaagaaaggacaccctgtttgcctatgtaccattttatcattaacccaaacgcaggctccggcagaggatggaaagtatggagagctattgccggttatatggaccggcacaatattgaatatgaagcggttctgacaaatgggatcggcgaagccagagacgctgccagagagctgacaaaggaagcaggaaagccatgcttccttattgttgtaggcggagatggcacgatgaacgaggtattagatggtgcatcctttcatggtcctttaaatcttggctatattccggctggaacaggaaatgatctgtggcgaagtctgcacatgccggcaagcccggtgaagtgcctgaaaaagcagcttcagccaagacatttttccatgatcgattatggtgtcctttcctatggaaaaggagaaccttttcacagacgtttcttagtcagtgccgggatcggctttgacgctgcagtctgtcaggcagcccttgactcccggcttcgcagccgtttaggacatatgggttttcgcaggctttcctatctgctccttgggatcggccagttttttaaatgcaggtcttccagaggatatattgttttagatggtgtaaaacgggtagaatttaataatatcctgtttatatcttgtcatatccagccttcagaaggcggcggctttgtttttgcgccaaaggcagacggaaaagacgggctgatgaacatatgcgtagtcagtcattctaaccggatgaaactgatccctcttcttttgggagccatgaccggcaggaaaaagcgttataaaggaaccagaacctatgagtgcagggaagtgaagatacacacagatgccccgcttccagttcatgtggacggagaagtgtgtggaaatgtaaacgatatacaggcagaatgtattccgcggaaagtacggatgatgttctgatcacagggtctgccagacagaattttataaatcagttataaaggagacataaaataaatgaggattggacagggatatgacgtacacaaactggtagaaggaagaaaactgatccttggcggtgtggagattccttacgaaaagggactgttaggccattctgatgcagatgtgcttgtacacgctgtaatggatgctcttttaggcgcagctgctttaggggatatcggacagcattttcctgatacggatccaagatatgaggggatatccagtatagaactgctgaaaaaagtaggggaattactggaagaaaaaggctatgtagtggaaaatatcgatgccaccatcattgcccagcgtcccaaacttttaaactaccgtccaaagatggcagaaaacattgcccaggcactgcatctggatgtatccagagtcagtgtaaaagccactacagaagaggggcttggctttacaggaacaggggaaggaatttcctcccaggcaattacattattgacggaagtagctgattactgctatgataataagatagtaaatgatagctgcacaggctgtggaggctgctgcggctctcaaaaataaaactggggataaatatgtaagtttgtaaagcttacagaaatgaggagaatgactatgaagatctttaatactctcacaagaagaaaagaagaatttgtcccattaacaccgggacaggtaaaaatgtatgtatgcggacctactgtttacaatctgatccacattggaaatgcaagacctatgatcgtatttgatacagtacgccgttattttgagtacaagggctatgatgtacagtatgtatccaacttcactgacgtagatgacaagatcatcaagaaggcaaatgaagaaggcgtagatgcagaagtgatctccaagcgctatattgaagagtgcaaaaaggatatggcagcgttaaatgtaaagcctgcaactgtaaatccacaggcaacccaggagatccagggcatgcttaccatgatccagaccctgatcgataagggacatgcttatgtagcagatgacggaactgtatacttcaaggttaaatcctttaaagaatacggaaaactgtcccataagaacttggacgaacttcagtccggtttccgtgaattaaaggtaagcggtgaagaagtaaaggaagatccaaacgacttcgtattatggaagccgaaaaaagaaggagagccttactgggagtctccgtggtgccagggccgtccgggctggcatattgagtgttctgttatggcaaagcactatcttggcgaccagatcgatatccacgcaggcggcgaggacctgatcttcccacaccatgaaaatgagatcgcgcagagtgagtgtgcaaatgataagacatttgcaaattactggatgcacaatggtttcttaaatattgacaataagaagatgtccaaatcccttggaaacttctttactgtacgtgatattgctgagaaatatgatctgcaggtactgcgtttcttcatgttaagcgcacactacagaagcccgatcaacttcagcgcagagttaatggaagcttccaagaacggcttagagcgtatccttacagcagtagaccgcttaaaagaactggatgcaaaggcagaaggtgcggcagagacctgtgcagagcaggaaaagatggtggaagtacagaagctgcgtgaaaaattcgaggcagctatggaagatgactttaacacagcagatgctgtttctgctatcttcgagctggttaaactggctaactccacagcagatgcttccagcaccaagtcctatgtttcctgcctgttaaaggagatcgaacagttatgtgatgttttaggcatcatcacagagagaaagacagaagttcttgacagcgagatcgaggaaatgatcgcagcaagacagcaggcaagaaaagacagaaactttgctcttgcagatgagatcagaggaaaacttctggatatgggtattgttctggaagataccagagagggcgtaaagtggaagagagcataactttaaaggactttctgggattttataaaaagacaatggaaatgggccctgtagacgcagggacctattctccgctggtgctggcatacattggagatgcagtctatgaagtgatgatccgcgcaaaagtgatcaacaaaggcagcatccaggtaaataaacttcataaaagaagcgcagaacttgtaaaggcaggtacccaggcagcgatgatccgtcttttagaagaagatctgacagaagaggaacatgctgtttataagagaggccgcaatgccaaatcagctactatggcaaaacatgccacgatggtagattaccgtacagcaaccggttttgaggcactggtaggctggctgttccttgaggagcgctttgaccgccttacagagcttgtaagcctgggccttacaaagatcggcgcaatggaaacaaaaacaacaccggcacctgaacaaaaaggagaataatagatgagatacgaagaactgactattgaaggccgcaatgccgtattagaggcattccgctccggaaaaaccattgacaagctgtttgtattagacggctgtcaggatggtccggtgcgtaccattgtcagagaagctaaaaaatacgataccattatcaattatgttgcaaaagagcgcttggaccagatgtctgagacaggaaaacaccagggtgtcatcgcctatgcggctgcttatgaatacgcagaggtagaagatatgttaaaactggcagaagaaaagggcgaaccgccatttctattccttcttgacgggatcgaggatcctcacaatctgggagctatcatccgtactgccaatctggctggtgcacatggggtcattatcccaaagcgccgtgcagtgggtctgacagctaccgttgcgaagacatcagccggtgcgcttaattatactccggttgcaaaagttacaaacctgaccgctaccatggaagacttaaagaagagaggtctttggtttgtatgtgctgatatgggtggtgacgtgatgtataaaatgaaccttaccggccctattggacttgtgatcggaaatgaaggggaaggcgtcagcaaacttgtaaaagaacactgcgatatggtagcatccattcctatgaagggtgatattgactccctgaatgcttccgttgcagcaggtgtattagcttatgagatcgtgcgtcagcgtctggcaaaacagtagatgtgcgaaagtacaaggagttgaacaggcagtgaaaaaaacaaagaagatcctatccgttttactggcggcagcaattatgatgacagcaggtcagaccggtctggtaacaggactggcagcagaggcccatgtacttacacccattgcctccggtgctactgtatacaaaaatgataaagcaaccctggatgcgtccaatacagcgtccggttatatcatggtaaaatatacaggcagtgtgggaaagatcaaagtacaggtgtcaaaaagcggttcagaaacctatacctatgatctgaacagcagcggtacctatgaggtatttccgttatcagagggaaatggaacctatcaggtaaaagtatttgaaaatatccagggaacccagtattcccaggcattcagccagagcctgaatgtggatatcacagatactttcggaccgtttctgtatccaaaccagtatgtgaactttaatccggccagtgcagcggtccagaaaggcgcagaactttcagcaggggccgcagaccagatcggagtggttactgctatttacaactatgtgatcaataacctgacttatgatacagcaaaagcacagtctgtacagtctggttatcttccaaatgtagatgtggttcttgcacagcatacggggatctgctttgattatgctgccttaatgacagccatgctgcgttcccagaatataccaaccaagctggttgtgggatatacaggaagcctttatcatgcatggatcaatgtatatctggatggccagggatgggtagacaacgtgatctattttgacggacatgactggaaactgatggatcccacctttgcttcttccggaaagcagagccgggagatcatgcagtatattggaaatggttctaattataaggctaaatacagctattagactgatcgcattacagtagcgtcacagaggaaagtaggaaagacaatggcagatcttgaaaagaaggaagaaaaaagcagacagtggaagccatattcctgcagtgaactgtccgctttctgcctgcaggtctctctgcttctggaagcagcagtgcctttagatgaaggattttctattatggcagaggatgctgcagatgaaaaagagcggcagatgcttttgtatatgtcagagggagcggaactgggagatccctgctttaagatctttaaagatacaggagtttttcctgattacgtgatccgcatggcaaaactgggacaggaaacaggtaccctggatcagatgatgaagtcgttgtctgattactatgaaaaagaggaccgccttatcaagacactgaaaaatgcagtaaggtatccggctatgatgatccttatgctgttagtggtactgtttgtgctgtttgtaaaggtaatgcctattttttcaaaagtgtatgaacagttaggggcggagatgtcatcggtagcccagtcagctatccggctggggggtacattcagtggtgctgcactggtcctgtcagccgttatagctgtagttatggcaggggttgctgctgcttctaaaatggggatccgcatcgggatcgctgataagatcaccacagagatcaaaaaccgcagtaagattgcccatgcgattgcaaaaaggcgttttacatctgtcttatcccttactttaagaagcggacttgaatttgaaaagggtctggaactggcaggagagctggcagaaaatgatcgcattgcagaacaggtaaagaaatgcgaagaaaagctggagctgggagaaagctattatgaggctttaaaggaaacaggtatgttttccggtttctatatccagatgatcaaagtgggaaccagaagcggtcatcttgacagtgttatggaagaaatttcaaatgattacgaagagatcacagacacagccattgacaatatgatcgcaagatttgaaccgaccatcgtggcagtgctggcagtttctgtaggtctggtactgctttccgttatgcttcctcttgcaggtgtgctttcagcaatctgacagaaggcatgagggaagacagaaaggttcagaccggagggatcctatgaaaataagagtgagaaaagacaaagaggataaaggggagtttagaggactcctgttatcctttttgctgtttttggcggcggcagcagcgtttggggccggttcccttggctttttaaacaggaccggtcagagaagtcaggaaacactgagaaaagccattacaagagcctgcatacagtgttatgccattgagggcaggtatccgcccagtgtggagtatctggaggaaaattacgggatccagatcgaccatgataaatacaatgttttttatgacggttttgcttctaatatcatgccggagatcacagtaatcccggtagagcaggagtgattaaggaggacgcaaacagatgaaagaaagaacacagacagggggacaggccataagcgggctttttaccatgcttctgtttctggtctttgttttatgcgcccttttttctgttcttatgggaagccgggtatatgaaaacatcacaaaacgcagtgatgaaaatttttcaggtacaacggctttaagttatattgccaataagatacgccagggtgacagagaagatgcagtggatataatagaagttgatggaacgcctgttttacagttgaagcagaaggtaggggacgagatgtaccatacctggatctactggaaagatggacagatccgggaattgtttacagatgaaaacagtggactggggctggaggatggactggagatcttggaatgtgacgggctttccatggaaaaagatggaaactctgtgaaactgcagactctgggatccggtggaggaagactggaactttcattaagaagcggaggaaatggggcagatgagtaggaatagaggatcaggttccgggccatttttaatggaaatggtgatcgctgccggattttttatgctttgtgtggctgtatgcgtgtctgcttttgtaatggcagatcatttaagcagagtcgggcaggatgttaaccatggagttttagctgctgaaagtctggtggaaagagtaaaagatggaaatacaggggattttggaacctatgagccagatgaagtctttggaacagtctttgaaaactggaagacaaaagatccggaggcaaaggctgtatatcagtatataaaagatggcggagaggtccggaattatcagatcctgtgggataaagaatggaacagttaccctgatacaaaagaactggaaaaaaatgggaaaaaactggcttacgtagggctgatcactacaggtgttaaggatcagatgaaagaaatcgcagtagttatctttggatatggaacttatggtgaccagggatataagatctaccatctttttgcagaacagtatgtgaaaccatgatcgcaggcgttcctgaaaaggaaggatactatagagaatacgatagaaagcaggtgggagaatggccggacaaatgtcaaaacacaaaataaatataggtctgacttccctgatccttatattcattatcctgtgtctggctactttcagtcttctttctttaagcagcgccagaggagaccagagtctggcagccagaagtgcccgtgctgtgacagagtattaccgggcagacgcagaaggggaaaaatggctaaagcaggcagatgccattttgcagaaagagatgacgaaaaaagcaatggaccaggaagagatccaggctcttgcaaagaaaatggcgttggaacttggctgtgatgcagatgaggaaacaggctttgtcagtacggatatttccatggaccggggacaggcacttcatattgatctggctcttacgggagatgaaaacagatacgaagtgagatcctggtatgtatatgacagcggaaattatgagatcgatgattttatgcctgtatgggatggaaagtaagaactgccggggttaaaagcaggaaaaacgggaatgataacgggaggaagagtaatggaggtaatggaacttcttacacaggctgtggaacagaatgcagcggatatatttctggttcctggtatgcctttttcatataagatcggtgggcggatcatctgccagggcgaggaaaagatcatgccggaccagctggaccagatgatcacaagaatctatgaaattgcaaagaaccgcagtatggagcgggtgttaagtcatggggatgatgatttttcctttgccattcccggagtgtccaggttcagggcgaatgttttccgccagagaggttccctggcagcagtgatccgggttgtgcggtttgaacttcctgatccaggtcagttaaaacttccggatgtgatcatggggatttcaaaacttaccaggggaatggttcttgtaacagggtctgcaggcagcggtaaaagcaccactcttgcctgtattattgatgagatcaataaaacccgcaatgcccatgtgatcacgttggaagatcctattgagtatcttcacaggcataaaaaaagcgtggttacccagcgtgaggttgcaacggatacggacagttatgtttccggactgcgtgcttccttgcggcaggcaccggatgtgatccttcttggggaaatgcgtgatcatgagaccatcagtattgccatgacagcagcagaaacaggacatctgatcctttctacccttcatacgttaggggcggccaataccattgaccgtgtgatcgatgcctttccgcccaatcagcagcagcagatccggacccagctttccatggtgttagatgcagtgatctgtcagcagctggtgcctaccttagatggcggggaacgtcctgtttttgagatcatgtttttaaataatgccatccgtaacatgatccgtgagtccaagacccaccagatcgacggtattatcgctacctcccaggaagagggaatgatatctatggataacagcctccttgctctttacagacaaaatgtgatcagcaaggataccgctatcatctacagcagcaatacagagctgatggagaaaaaaatagcaagactgtaggaaaagtatcctttgctgactgattcagaaaggagctttcatgaaaacagataaaagaaagatcgtgatcgtaggtaccggaatggtgggaatgagttatgcatactgccttttaaatcagtccgtatgtgatgaactggtactgatcgatgtagataaaaagcgggcagaaggggaagccatggacttaaaccatgggcttgcttttgccggttccagtatgaagatctatgccggggactatgaaagctgccaggatgcagacctggtgttgatcgcagcaggagtggcccagaagcagggagaaaccaggctggatctgttaaagcggaacacacaggtatttcgttcgattatagagccggtaactgcttccggatttaacgggatctttctggtggctaccaatccggtggatattatgacacggatcacctgcgccctttccggctttaatccaagaagggtattgggaagcggtacagcccttgatacggccaggctccgttatctcttaggggaatatctgggagtggatccaaggaatattcatgcttatgtaatgggagaacatggagacagtgaatttgttccctggagtcaggcttttctggcaacgaaatccatttcccagctggactgggagctagagtcttctttaacggcccatttacttcgtattgaagaagaggtgcgtacagctgcctataagatcatagaggcaaagaaatctacgtattacgggatcggtatggctctgacccgtatcacaaaagccattctgggagatgaacacagcgttctcactgtttcggccatgctcaggggagaatatgatcagatggatgtatttgccggtgttccctgcattatcaatcagaatggggtacagcggatcctgccgttgtcacttacagatgaagaaaaagagaaatttaacggatcttgtgatatactaagagaaggctatgagggtatcttgtagttaagcctgtttacctgcctgtgcggactggttcaggatgaatatatacatgaggaggaaaagaaatgaaagttttattattaaacggaagtccaagaaagaacggctgtacttatacagcactgaatgtagtagctgatgctttaaaggcagaaggcattgacgcagaagtgttccaggctggtgatccggatatggaaaatgtaaaggcagcagcagccaagttaaaagactctgacgcattagtggtaggctctcctgtttactgggcatctccaagcggccagatcatcgaatttatggaccgtctggcatctgtagcaggaaaagatatgctctataagccagcagcagccgtagcatccgccagaagagccggaaccaccgcaaccttagatgtactcacaaaatacttctcctatcaccagatgcctgttgtatcatcctgctactggaacatggtacacggaaacacaccggaagaagtaatgaaagacgaagaaggcgttcagatcatgcgtgtccttggaaagaacatggcatggctgttaaagtgtattgaagcaggaaagaaaaacggtgtagctgttccggcagcagaagataagatcaagactaattttatccggtaattgatcatatgaaaaataagttcagggagatggagcggagatgttccatctccccaaattaattgcagcacttttcaattgaatgacaaaaacaaaaaagcagaaacccttggcattccaaaagcttccacccttttctaagctgctgacgggaatcggacccgtgacctccgcactaccaatgcgacgctctaccgactgagccacagcagcaactatatgaaatttgccggttctgatgagatgaaaagctgctgacgggaatcggacccgtgacctccgcactaccaatgcgacgctctaccgactgagccacagcagcgttttctgttcgtcaaaatcgaacctcgtatatactatcatggggaatagtatttgtcaacggtaaaatgaaaaaaagttaaatattttttatatcgtttttacgtactttaagatcatctttgttaactgctccggatccgctggttttaacacataatcatccattccatactggcggcactggctggaaacactgatggcatcctgggcagtcatggcaaggatgggaatcatatttccgtcaggacgggaaagggaacgtatctgcctggaagcttccagtccgttcataacaggcatcatcacatccataaggataatatcgtaggttccttccggtgaccgctcaaactgttccagagcctcttttccgttccatgccttatctaaggtggcaccgcggtctgtcaggtagaactctgcgatctccatattgatctcattatcctctactaaaagtacatggatcccttccagttcttttccagtttcggacgccgtatcagcctttgcatcatttgcctcttcttttgcaagtcggaaaggaagacggaaagtaaaagtagtgccttctccagggctgctctctacttctatcgaaccattcatctgccggatcagaccctttacaatagacattccaaggccggttcccttgtactgtgtgcgggcatctgatttttcctgtgaaaatggctcgaaaagctggttctttaaaaatgcttcgctcatgccgatgccagtgtcggaaatgaaaaattcataaacgacggttgttccgtcaaaagagatctcttttgcgccggtatcaataaaaccgccttttttattatacttgatggcattgctgaaaagatttaacatgatctggcgcagctgcaggggatagccggagaggagcacatgctggatattttgccggtgtgtccggtgtgtcagatccatttccatgatctgggcttttaccagataggaaacatcccgcatcagttgggataagtcaaaatctacaggcttaaaaacagcctgtctcgactctaacttgctcatatctaaaacgtcatttaccagagcaaggagatggctggaagaaacgtagatcttctctaagctgtcatctacccgcgcgtggtcctccctgtttttgcgtatgatctcaagcattcccataataccgttgataggggtgcggatgtcatgactcatacggtttaaaaactcggtttttgctttactggcagagtcggcttcctcaaaggctacctggagccgttctctttcctgctgttctttttcatggaagacagaagtgtttttaaacaggatcataccatggatcacagtgctttcttttccggtttcactgttataaaccgtatcctgtgacataagcactgttttttgcagccagaaaatttctccgttttcattttgttccctgtattctacggtaacctgcttggtaccggagcggaaacgctctaaaagtttcgcagaagagtccacaatgcggtaattttcctgggtatcttccgtaacaaaacgactgcggtttaaacagtattcatcataagaacagggaaattttatgttcaggtcaaattcgcattccgttgtgtgatagaagattttttccaaccggtcccctgtcaggtctacagaatagacagcctgcgcagactctaaaagcgcgtccacataattcccattttcaaggatagactgcttcatctgctcgtaatactgatttaactgtgttttctcatctgttttagtattttccatattttggaaaatttcaaagccaaggataaaatgatgaagctgcccgcttgcattggcatctaaataaagcaaagtcagacggcctttgtgggaaataccgttggcagtatactgacagaacaggcggatgggggaattgttctccatcagtttttcatttaaagtttccaactgcagctgctttcgcagtgctttgatattttcggttgcagaaacctgggaaaggatctgttccactgcaccggagtagcttccgtcatctgctaagaagaaatcggagctggcacgcagtaccttatactgatccgtcagggcgtcacagtagatacagtcggaaaaatggaaaccctgagaacggatggaagaaagcagctcaagatgcagtttcttttcttttgccgcttcctccagttttgcccggtttttgtcaatgtacatatttttatctgcgtaccggaacagttcccgaagggtacttccctcaaaatcttccgaagtggcatatccggctgcatagctgataggcatatctggatggagacgggaatagtctgcacacagctgtttcaacttaaaaagaaaagcatggaaagcactgctttctgtatcttttataatggcaataaattcatcaccgccatctcttcctgcaaactggtcatcagggatcgcctgatacagctggtcagcaaaggaacggatataggcgtctcccatttcatgtcccatggtattgttgatgatacgaaggttatttaagtcgaagacgcatactgctgcaaaagcatctgcaggtacaggtttcggtgcatttaaaagttcctcacatttatttttgttgggaaggccggtggcttcgtctaaatataccttgctttggagcaggcggtttaaagcagcataccgaagggtttttaccagctctgcaccgatcaggataagaaggcctgcaatatccgcaaatacgatcttttccaactggtttaactgtgtggcctttttctgggagtaaacttctgcaaggccggtagcttcgttgcagatattgaaaaaacgctcacttttggcgataatatctgttttacggtaatccctcatacggacttgggcgacctcttcttttaactgggaaaaataggcatccagttctttcattttggcctgaaagtcaggatcatctaagcgcaccaggtttaactgactgcttccgttttccagaccgtcaataaaggcatcaatatcagcgatcatttcatcctgggggcttccggagatctccaatttaataatacgctgggtctttccacggaccagaccggcataattgaccactctggcagtaccctggatcttacttaccagggacatgataaaaatgaaaagaacgatcagcagtatagttaaaagtgtcatgccaagccgtgacaggtaggattttttctttttaggcatggtttctgatttcattttcatataactccattccactgttttgtaaccattttattctattttctatttcttggcaagaatgaaaatatgtggttacaaagcaggtacaaacttgatattttatgcccctcatgttacacttgtaataataaaaaagtatgacttggcagttgataaatggggactgatcctggtattggaagatccggatcctgtagaggatgtcagttggtagaggataatgagctgaaccgggaaattgcccagtttatcttagagcatacagggatcacagttgtcaatgcagagaacggaaaagaagcagtggaaatatttaaggcttccgaacagggagagtttgattttattttaatggatgtgatgatgcccgtcatggacggactggaggcaacaaggatcatccggaaaatggaacgcccggatgcagtgcagatccctatttttgcaatgacagccaatgctttttccgatgacagaaagcgctgcaaggaggccggaatgacggaacatctagcaaaaccactaaatttagagaaaatgatcgcaaagctgcggctttactataaccggaaagtgtgatattattttaaataactatgacgacagatcacggaggagcagttatggcagagaaagacattgtagtagaaaccgaagaaaaagagctggtttctaagaactttatagagcaggaaatcgataaggacctggcagaaggcgtttatgaccatgtacagacccgttttccaccggaaccaaatggctatctgcatatcggacatgccaagtctattcttttaaactatggactggcacagaaatataatggcaagtttaacctgcgttttgatgatacaaacccaactaaggaaaaaacagagtttgttgagtccattatggcagacgtaaagtggttaggagcagattttgaggacagactgttctttgcttccaactattttgaaaaaatgtatgagtgtgctgttttccttattaagaagggaaaagcctttgtctgcgatttaagcgctgaacagatcagagagtacagaggcgatttcaatacaccaggtaaggaaagcccatacagaaaccgttccatcgaagagaacctgcgtctctttgaggagatgaaggaaggcaagtatcaggacggcgagaaggttcttcgcgcaaaaatcgatatggcttcccctaacatcaacatgagagaccctgtcatctaccgtgtagctcatatgcatcatcacaatacaggtgataaatggtgcatctatccgatgtatgacttcgctcatccgatcgaggatgcggtagagcacattacccattccatctgtaccctggaatttgaggatcaccgtcctctgtatgactgggtagtaagagagtgcgaatttgaaaatccacctcgtcagatcgagtttgcaaagctgtacctgaccaacgtggttacaggtaagcgttatatcaagaagctggtagaagacggaattgtagacggttgggatgatcctcgtctggtatccatcgctgcactgcgaagaagaggttatacaccggagtccatcaagcgttttgtagagttagttggcgtgtcaaaggcaaacagctctgttgactatgcaatgcttgagtactgcatccgtgaagacttaaaactgaagaaatcacgtatgatggcagtgttagatcctgtaaaactggtgatcgacaactatccggaaggacaggtagaagaactggatgttccaaacaacctggaaaatccggaactgggaagcagaaaggttccattctcccgtgaagtttatatcgaaagagaagactttatggaagagccgcctaagaaatatttccgtatgttcccaggaaacgaagtacgtcttatgggcgcttatttcgtaaaatgcactggctgcgaaaaagatgaaaatggcaatgtaactgtagtacacggaacttatgatcctgagacaaagagtggttccggctttgaaggcagaaaggtaaaaggtaccatccactgggtagctgtaccaactgcaaagaagatcgagtgccgtctctatgaaaatatcgtagatgaggaaaagggtaagctgaatgcagacggaaccctgaacttaaatccaaattcccttactgtattaaaggagtgctacggtgaacctgctcttgcacaggcggaggcttatgacagcttccagtttgtaagaaatggttatttctgtgcagactgcaaggacagcaccaaggaaaatcctgtatttaaccggatcgtttcactgaagagttctttcaaactgccgaaataatgaagtgaagcaaagcaatgaggctctctggaaacagagagcctttttcatgttaggagaagccctatggaattaatggtgcctattgaaaataaagacagcatccccctttatgaacagatctaccgctacataaaaacagaaatacgggccggcagactgcgggctggcagcagacttccttctaccaggacacttgcggacaatcttcatgtaagcaggagtacgacccagttggcttatgaacagctgctatcagagggatacatagaggctcttccctgcaggggatattttgtctgtcagatcgaagaactggtagaagtaaaatatcacggagtgccggaagaaaaagaggaaaagcaggaagaaaatgaaaattacaattacaaagtagacttttccccaagaggtatcgacctagacagtttcccttttaatgcctggagaaaactaagcaaaaatacgctggtagatgacaacaaagatatgtttgcagtgggaaatgcccagggagaatacagcctgcgtcaggtgatccgggattatcttcactctgcccgtggagtccactgccgtccggaacagatcctggtaggtgcgggaagtgaatatcttttaatgctcctttcccagctgatcggccgcagtacgggtatcgccctggaaaatcccacttacaagcaggcctttcgtgtatttgaaagcctgggtcatcctatttttcctgtatctatggatgaatggggaatgaaggtgaaagagttagagaaaacacaggcacggatcgcctatgttatgccgtcccaccagtaccccacaggaatcgttatccctattaaaaggcggcaggagctgctgaaatgggccaaaaaacaggaaggccgttatctgatcgaagatgattacgacagtgaattccgttataaaggccgtccgataccggcacttcagggaatggatgacagccagaaggtaatctatatgggaaccttttcccgttccattgctccggcgatccgtgtgggctttatggtacttccggagccgttgctggctttataccgggaaaaagcaggtttttatgcatcaactgtatcaagagtggaccagaatatcctgactcattttattatagaaggatattatgagcgccatttaaacaggatgcgatctgtttacaggggaaaacatgatacgcttcttgcaggattaagagagctggaaccctattttgagatcggcggtgagtatgcagggatccatgttctccttacccataagaaagggatttcagaaaagaaactgacagagactgcagcacaggcaggtgtaaaagtctatggaatgtcagattttgtaataggacaaaataaagatctttttccgtctaccgttatacttggatatgcaagtttaaaggaaagtgagatcacagagggctgcaaacgccttgtaaatgcctggaaagaattagaaggtgaataaattgaaaataaatggaaaaaagcttccgggacagtggctggcagcattggtggcttatggtctggctcttccaacagctggatttttgggaatgagcagggctttaccggcaacagagccgccggttatggaacagaccgaagcaacagaagaaaccataccagaatcgagcgaagtgccggaaagtgatatggaaacggaaacagcgcaggaaatcgtagaagaaaattcgttcagtgccagatatgaggcacttccgcaagatcagaaacagcttttggaagatatccgtgtggcagtggcagcggaagatatggtccaggctgccaagcttctggataaaaaacaggaggttcttgcccagatcttttacggaacctttgaaggagaacgtttcctttatgatggcagtaccatttcagaggaaatagagggagagggactggtatttaccatgccggagatcctgttttacggaacttttcaggatggccagcctcagggaaactgtctggcattacagtttgtaaatgtggacagccccagatataatttctcaaacggtgtatggagcagtggaaaaatgaacggacagggagcaactggctactgttattatgaaaatgttccccagggggaatatgcctgggtggaaaagcagggacagtttgtggatgatgaaatggagggcagcatttcctatgagatccgtggaacagatgatacgctgtcccactgggatatgaatgtttcccagggaaagatccagttagacgaacgttggacccatctggatgatgcaggcgaataccagcttatgtctgcggactctgtcagccatgcctatctgatcgcagatgatcaggtagatcaggtattgtggatgaatcttctgggctgggattaaatgaaatatggacaacagaggggaaaatagatataatatctaaaagaaaaatccggttaaataggatacgatacatgaatggataaaatgacggaaaccagactgtaaaggagaaagacatgaaattcaatgccgttttgacaaaagaacaggcaaaggaaatgtttgcttatttagaagacatatttacagaagtaaaggtcctggatatagaagcagtcaggcgtctggaaaaagataaaaattctatttcattaaaggcattcagggaacggtgccagaaaaaaagactggaatacgttgagtccagggtatatcagaggatcgcgcgttatgtggagatcgaaggggaaccttacgttgtagagatgttgaatgttctgggggatgcagcagactcagaggcaaatgcaagggaagcactggtggcaaaagtccggggatataatgaagaactgtatctggatgcgctgacaggagcttacaaccgcagatattatgaggacaggatccgcaaagtgaaaagtcatgcaggagttgcaatgatcgatctggatgattttaaactgtacaatgatacctgcggacataatgcaggggatatggtgttaaatacagttgtggggatcgtgcgcaaatgtatccgaaaaacagatatcctgatccggtatgggggcgatgaatttctgctgatccttccggatgtgtcggaagatgttttttcaaagaagttaaaacagatccgggatatggtctatgaggcagaagttcccggatatacacagcttcacctgtctgtaagcattggaggcgttttggctgataatgaaacagtggaaagcgcggtaggaagagcggacagcctgatgtatcaggcaaagaaccggaaaaatatgacggtaacagaaaagtccggtattgacagtgtgaaaggcagggaaaagcagcaggtcctgatcgtagatgattcccagatgaaccgtgagatccttgctgtgatcctggaagaggaatacaagatcttagaagctgcaaacggggaagaatgtattgatctgttaaagcagtatggaaccggtatctcactgatccttttggatatcaatatgccggtgatggatggttttgaagtattggcgctgatgaaccgaaaccactggatcgaagacacgccggtgatcatgatctccagcgaagatggcgcggcttatgtgagaagggcttatgaaatgggggcatctgattatatcagtcgtccttttgatgcccaggtagtacatcagagagtgtttaataccattaaactttacgcaaagcagagacatctgatcagtctggttacagaccagatccaggaaaaagagaaacacaaccggatgatggtcagcatcttaagccagatcgttgagttcagaaatggagaaagcggcagccatgtattacatatcaatacgatcacgggcatgctgctggaacgtctgatgcagaaaacagaccagtatcatctgctgtggtcagaccgtttcatgatcacaacagcttccgcacttcatgatatcgggaaaataggaattgatgaaaaaatattaaacaagccgggaaaactgacaaaagaagaatttgagatcatgaagacccatacactgatcggtgcttctatgttggacagtctggaaatgttccggaatgaaaaactggtacaggttgcataccagatctgccggtggcaccatgagcggtatgatggaaaagggtatccggacggattaaagggggaagagatcccgatcgcagcccaggtggttgcaatggcagatgtatatgacgcccttgtaagtgagcgtgtatacaagaaggcattttcccacgaaaaagccattgaaatgatcttaaacggggaatgtggagtctttaatcccatcctgttaggatgtctggtggatatccaggatcggttaaaagaagaactgcagtccggatttcaaaagaagaaaaatgaggatctttatccggtattatcagaggagataaaagaggagacagaaaagtgagagaaaacagaatatctgtttttagaaaacataccttaggtatactggttgctttgggaatggttctgtttggttctgtattcattttatttacaaatattggaaaaaacaaagcgactgtggcagcagaagaaacgttacagtttataaaggaacagagcagccggtcagaggcatttgcagagttttatcagggccttcatctggaaatgaacgggatcataatgatctgcaaaaatggccttgtgacaggatcaaattttgaggaatatcagggaaaaacgcaggcagaggcacctttgatccagaatataacagaagagacagagccggatactttattttcctttcgctactacggatctgcttattttggggtctttgagtcttatggagagaatgatctgtacgtattttatcctgtggcttctgtttttttcctgaggaccctggcattagcttatgtcatgatcctttatatccttttatgcagtgttttcttatggctgcgtcagagagaagaaaaggagcaggaagaaagggaaatggcctgtcaggaggcagttttgttatctgccacaaaggaagaaaaggcaaatgcagctaaatcagactttcttcgcaagctcagttatgacatccgcactcctatcaatggcatccgggaactggtagaattgggcaatcgttatgaccatgaccttgaaaagcagagagaatgcaggaaaaaaatatgggagacctcagatgtgctgttagatctgatctcagacatggtggatatggacaagttggagtctggcgctgtggatttggaactgagatcttttgatatgagggagttatatgaggatgtctgccagtgggcaaaagagcttgctgctgacagagggatccgttaccacagcagacagttatctgggaaaaactggaaattatatggcagtccgtctcacttaaagcagatcctgaaaaatgttgtgggaaatgctattaaagataaccgtggtggtgactgtgtagaactttcctgtgaagaacgtcagtccgcgggagggacagcctggtttgaatttgtctgtacagatacccgaagttcttacagaagaggggaaccgggattggcagttgccaaaggcctgatccagatgatgggcggggagatccatttttcagatgaagaaacaggcgaagcattctgcaggatccgtctgccgtcccttattgatgaagaacaggcgcaggagaaagacgcaaaggtccaggaagctgtgaaacgtcctgtatccatccggggaaagaagatccttttagtggaggataatgagctgaatatggagatcgcggagttccttttgcgaaaagaaggagcccaggtcataagagcctggaatggaaaagaagcgttagaatgttttgaggcttctgctccgggagatatttccgtgatccttatggatcttgtaatgccggtgatggatggatttcagtcagcaaaagcgatccggagcctggaacgggaagatgcctctaaagtagcgatcatcgcccttacagccagcgattatgaagaagatgcacaaaaatgccgtcaggcaggaatggatgaacatcttccaaaaccattagacgcaggaaatttgatccgggtgatccagaaatacttaagatgattgggtgagtgcaaagaacatagcaatccggtatcagaaaaattaagaaaaaagagctgcacggctttggggctgtgcagctcttttaaagtctggttaaatcagattagatggtatcttcctcgatggtagctgtttctttttcaggttcagctgccttggctgtctcttctttttcttcgctttcttcttccagatcatcagcggcttccggattaacagaaacagagatgttttcttcttttgctggtgaaggagagtgatccagacgttcgtagtcgtaaagatcgtcatcgtctacatagtcatcatccagataatcttcttctgtaaaagagtctccctttttaggatcatcctcttcttcaaagagatcgtctttttttgctttcatggagtggatagcgatatgtgcggtatctacagcagcggaaactgcttcgtgggctgtatcggagaacagatttcctgcatcttttaatacatttttagtagcagatgccatatcttttgctgccattttaaattcatccctgctggaatttaaggagatataattgcggtttattttacggggatcaaaggagtcactctgggaagcgtcctcgtcttcttcgtcctcttcaaattcacggaaatctttatcaagctctttatggtagatcttgtactggagtacataggaaacgccagctgccacagcaccggaaatagcggcaaaggctacaaactttccaaaacctttcttagccatacaaatacccccttcttaaaatagtgtctgaatttataaattagtatgtctgattattatattgtaatacgaacagaaaaaaaaagaaactaaaattgcaaaaaaatataaaagatttacaaagttaagagacaaaatgaaaaaattagcactcagaacttgacagtgctaacaataggtgctataacttacattgtgagcgaaagaagcagcgaaaagtaaaagctgcaggtagaaaaataagaatgacgatcaaggaggaatctagttatgaagttagttccattatttgacaaagttgtattaaagcagttagttgcagaagagaccacagcatccggtattgttcttccaggtgcagcaaaagaaaaaccacagcaggcagaagttatcgcagtaggcccaggcggtgtagttgacggcaaggaagttaccatgcaggttaaggctggagataaagttatctactccaagtactcaggtacagaagtagagttagagaaagaaaaatacgtgatcgtaaagcaaagcgacattttagctgttgtagagtaaagaaaaatgccagaggcatttttcgctacgcaaacgcagcgcagcggagttcgcgtttcccgtatagtaggtataaatacgaaatagtttagattgttcggaggtaaataatcatggcaaagcagatcaaatatggtgtagaagcccgcaaggcactggaagcaggcgtaaatcagttagcagatacagttcgtgtaaccttaggaccgaaaggacgtaacgtagttctggataagtctttcggtgctccactgatcacaaatgatggtgttaccattgcaaaagagatcgaactggcagatccatttgagaacatgggcgcacagctgatcaaggaggttgcttccaagaccaatgatgtagctggtgatggtactactaccgcaactgtactggcacaggctatggtaaatgaaggtatgaagaacctggctgcaggtgctaacccaattatcttaagaaaaggtatgaagaaagcaactgatgcagctgtagaagcgatcaagaagatgagccagccagtaggcggcaaggcacagatcgcaagagtagcagctatctctgcttctgatgatgaagtaggaaccatggtagcagatgctatggaaaaggtttccaaagacggcgttatcaccatcgaggaatccaagacaatgaagacagagcttgacctggtagaaggtatgcagtttgacagaggttacctgtccgcatatatgtgtaccgatatggataagatggaagcaaatctggatgatccatacatcttaattactgataagaagatctccaacatccaggagatcctgccaattcttgagcagatcgtaaagatgggcgcaagactgctgatcatcgctgaagatgtagaaggcgaagctcttacaaccctgatcgtaaacaagttaagaggtactttcaatgtagttgctgttaaggctcctggctacggcgacagaagaaaagaaatgctgcaggatatcgctatcttaaccggtggtactgttatctccgaagaagttggtctggaattaaaggatgctaccatggagcagttaggccgtgcaaaatccgttaaggttcagaaagagaacacagtgatcgttgatggtaacggcagcaaggaaatgatcgcagcaagagttgcccagatccgtaagcagatcggtgagaccacttctgatttcgacagagagaaattacaggagcgtctggctaagttagctggcggtgtagctgttatccgtgtaggtgctgctactgagaccgagatgaaggaagctaagcttcgtatggaagatgctttaaatgcaacccgtgcagcagttgaagagggaattatcgcaggcggcggttctgcttatgcacatgctaccgttgatgttcagaaggtagttgatactctggaaggtgacgagaagaccggtgccaagatcatcttaaaggctctggaagctcctctgttccacattgtagcaaacgcaggtctggaaggcgctgttatcgtaaacaaggtaaaagagtccccggttggcgaaggctttgatgcttacaatgagactttcgtaaacatgatcgaagcaggtatcctggatcctgttaaggttacaagaagtgcattacagaatgcaaacagcgttgcatctacattactgaccactgagtctgtagtagcaaccatcaaggagccagctccggctgctccggctgcacctgatatgggcggaatgtattaatcagaaatataaaaataggaatatactgttagtaaaaagaagtctgtggcggataaaaacgttgcagacttctttttttgttaaaaatttgtctgacctattgcctttttaataaaaaaatgctaatctaaactcatgagatgtcagacgaatttttaaaaaataatatgatgaattaaaaggagaacggttatgaagttacacagtcaggaagttagaaaacttgcaccggaaaatgacccgttaaagatcggaatgggatggagcgtggcagacctggataaacctcagattttagtagaaagctcttttggtgacagtcatccgggaagtgcccatctgaaccagtttgtagaagagggcgtaaaagcagtcaacgataacggaggaaaagcagccagatattatgtgaccgatatctgcgacggcattgcccagggacatgacggcatcaattattctcttgcacacagagatatgatgaccaatatgatcgaagttcacggaatggcaagcggctttgacggcggcatgtttattgccagctgcgacaagtccgtgcctgctattttaatgggtatcggccgtttaaaggatatgagtgctattgtagttaccggcggtgttatggaagcccatactattacaccaaagtatgtggaaaatgacccggcctgcgctattaacgaactgctgacactggagcagatcggtaaattcgacgcacaggaaaagagaggggagatcccggaggaacagttaaattattataagcacaatgcatgcccaagctgcggcgcatgttcctttatgggtactgcttccaccatgcagatcatggcagaggcactaggccttatgcttccaggcactgccctgatgcccgcaactgcaccggaattaaagcaggctgcttatgatgcaggaaaacagctgatgaagttagtagaaaaaggtatcaaggcaaaggatattgttaccatgaagagctttgagaacgctattatggtacatgctgctatcagcggttctaccaatgcaaccatgcacattcctgctattgcccatgaattcggctttgaagtagatgcagaaacctttgaccgtatgcacagaggagcccactatctgcttaatatccgtccatctggtgactggccagcccagtatttctattatgcaggcggtgttccgagagttatggaagagatcaaggatatgctgcatctggatgtaatgacagttacaggcaagaccttaggtgagaacctggaagaattaaagaaaaatggtttctatgaccactgcgatgaactgttaagggaaaaaggcaagctgttaggacgggagatcaagcgtacagagatcatccatgcctttgatgatgcaaagggaacagatggaagcattgctattttaaagggcaacctggctccggaaggctgtgtgatcaagcacactgcatgcccgaaggaaatgtttgaggccacccttcttgcaagaccatttaacagtgaggaagagtgtattgacgctgttcttaagagaaaggtaaaaccaggggatgctatctttatccgctatgagggaccaaagggaagcggtatgcctgaaatgttctatacaggtgaagctatatgttctgacccgaaactggcttccagcgtggcactgatcactgacggacgtttctccggtgcatccagaggcccggttatcggtcatgtaagcccggaagctgctgcaggcggacctattgctctggtagaagaagatgacctgatctatattaatgtaaaagagcgcagactggagatcgtaggcgtaaagggtgaaaagcgcactccagaggaaatggaagagatattaaaggccagaaaagccaaatggcagccaaagcctccgaaatataccaagggaacccttaagctgttctctgaacatgcagtatcacctattaaaggcggatatatggtgtagtcctgagtggatccagcgcatggaataatcttaccaaaacatcagacaataaaagctgtctgaccaatataatacaaattaatgccttttgtacacctgtacaaaaggcatttttattgcagaaaacaaacacaaagtaatattgcacaaaaatatgaatacaaaattgtggaaaacataaaaaacgcatttgagatacacaaaattttcacaatcccttgacataagatgtctgatgtggtaaaaagattacatcagacatcttattaattaagatcctgcagatgatcaggatctattaaaagaaagggaaggtattaagttatgagaaagtcaaaagtaatgttaacaatcctggcagcagcaatggcagcaagccttacagcatgtggaggttcttctgacaaaggagcagctacaacagccgcagcagcaggcggttctgacacaaagacagaggcagcaggctccacagcttctgcagatgccatcaactttacaatgtcactggttgacaatacttcttccaactactacaagggcgctgaaaagattgctgaatgtgtagaaaaggcaactgacggaaagatcacactgaccatccaggcaggcggcacattaggcggcgagagcgatacactggacatggcagttcagggcgaccttgatatcgcatcctgtgcaaactccgtacttgctaactacatcccagagatgagcattctggatcaggctttcctgtgggacagcgcagatcaggctaactacgcagtaactcatgagttaggcgatctgatccagactaaggcaaatgagcatggtattcacgtaattggctacatggaatccggtttccgtgatgtattctccacaaagccaatcgagtctatggcagatttcaagggcgtaaagatccgtgtaatgcagaacgaaggacagttagcagcatttaccgctttcggtgctaacccaatcgcactttccgcttctgagcagtttaccgctcttcagcagaagaccattgatgcttgcgagaacgctgtttctaactgctggatcaacaagttctatgaggctggtgtaaactccgttatcaatacacatcactgcttcgtatacatcccactgtgcatgagcgataacgcttggaacaagatcccggatgatttaaaagataccttcgttaaggctgtagcagaaggctgcgaagctcagtggcagtatctgaacgaagcaaacgaagaagctaagggtaacctggaaggcgctggcgttaagttctatgacatcaacttagatgaaatgaaggacgcttacaaggcagctcaggagaaggctggtacttctttcgatgcagaatgggaagcagcagtagatgcagcaaaagcagctgtaaaataatctgccaaagatccacaggcaacacaaaataaaaaaagcagtaaacatacagccgtgccggcaacagtcagtgacggtgcggctgttttaaagagcgagagaaaagaaggggactggaaatgaaaggaattaagaaagcattatcttacattaccaatgtagaatatgccatcatggtcgttacctttgtggcaatggtcatcgcgtatttcatctctgtcgtaaaccgtaacttcatcaaggcatctatgccatggacagaagaagttgcaatgtacagtatgatctatatggcacttttaggaacagaagttggtcttcgtgacggcacgcaggtagcagttactgcagtgatcgaaaaactccacggagttacaaaaaagatcgtatctattattgaacagatcattctggagatcttctctttcgtaatgttaaaagcaggtctggcactgttttccaagcagttacagaccggacagaccacaccggttttaaaagtaccaatgtcagtaatgtacttttcactggtcctgacctttgcactgatcctggtcatccaggcagttgtgctggttgaaaaagttatggacctgaaaaataaggaggtagaggcatgagcgcaggagtaattcttttcgttgcattcgcagcatgcctggtgatcggtgttccggtttccatttctttgggagtggcttccctttgctccgtagtatttggcggactgtccgcatcttctacggtaatcgcacagcgtattttcggtggacttcagtcaacttctattatggccatcgcattcttcgtacttgcaggaaacctgatgacaaaaggtggtatctcccgccgtatcgtaaattttgctaactgtctggttggtaatgtacgcggcggtatgagccttgcgctggtacttgcatgtgcattcttcgcagcattatccggttccgcacctgcaactgttattgctatcggaaccatgctttacaacgacatggtcaagatgggatatcctggtgaccgtacagccggcctgttagtagtatccggtggaatgggaccgatcattcctccatccattatcatggttatctactgtaccttaaccggtgcttctgtaggtaatatgttcaaacagggtatgttagtaggtgttaccatcatggtagtgcttatgacagaggttcttttcttcgcaagaaaagaaaaatggccaaaacaggaagtaaagcgtacaccggcagaaatattcaaagtgttcttagatgctattcctgcattaatgacacctatcatcatccttggcggtatctactccggtatgctgacagctactgaaagtgcagctgttgccgttgtatgggcagctattgcaggtctgttcatctacaaggaactgacatttaaggaactgatcccgatcttaaaggattctgcaaagagctccgcaatgatccttttcatcatcgcttcctctactgcgttctcctgggtatttactttctccggcgcttcccaggcactggtagacaccgttgtagcaatgaacctgaattctatgttattctgcttcgttgttgctatcattcttcttattttcggtacatttatggaaggtactgccatcgcagttttactggttccggttctgtggccgatcgcccagagcatgggaatcgatgttatccattttggtatgatcgtatgtatctccaacgtagtaggtactatgacaccacctgttgcagttaacattttctctgcgtcaactgtatcaggactgaaaatgggagacattgcaaaggcagagatcccattcctgatcggatatgttgcagtatttttcctgtgcgtattctcaagaggtttctgtacaatgcttatttaattttaaaaactggggccgcctgcaggcggccttataaataatcacataacatgatcagcaaaaggctggtcaggtataacaggaggtttatcatgatccaaggtgaaataacaaaagaacgtatggaaggatggaagtttgattcttcctgtgaagaaggattccatgagatcattgcaccaggaaaggcagactgtgaacaggagtatatttaccgtttaaacctgtccgcaggaaagagttttgatctggagaccggaaaactggaaatggatgctgtatgtatcaaaggtgcagcagatttttcctgggacggttatgcaggaacctgtgataagctggattccttctatgtagtaagcaatatgaaagtacatattacagcaaaagaagactgtattttctacattgcaggtgctgttgatgaaggatatggaaaaccatttttccgtaaatgtgacctgaccatgcctattggtgagatccatcagatccatggctccggcgtcagccagagagaggtatttatgaccatcgatccaggtacagcatcttccagactgttagtaggtctgacctggggcggaaatggtgcatggaccagctggccgcctcatgagcatgagaaggatctggaagaggtttattgctactttgatatggatgatcctcattttggactgcatttaagctatgtagaaccaggagatacccatggagtagtagctcatactgttaagagtggtactatgatcctggcaccaagaggttaccatcctacagtagctgcaccaggaaccagaaatacatatttatgggtactggcagcacattcccacaagagtcgtcgttatgatctggcagttctggacccgaagcgtgcagaaatgaactaggtcggaaacaaagttaagagttatatttaggaggcagaaacatgaacgcaatggattcaatttttctcccacgttttaccattggcgagaatgcatttgacgctttccatgatgaaatgggaagatatggaaaaaaagtagcagtgatccacggagaaagagcatggaaggcagcaagggaatatgtagttcctgcactggaaaaagcaggtcttacgattactacagaatggctgtatggacatgatgcaacccatgaaaacgctgataagatctcaaatgatcctgcagtacaggaagcagatatgctccttgcagtaggcggtggaaaatgtatcgatacagcaaagctggctgcagatcaccttggaaaaccggtatttaccgctccttccattgcgtctaactgtgctcctgttacccagatcagtattatgtaccatgaggatggttctttctgcgacatcccaagattaaaggaagtaccagtacactgctttatcaacccgaaactggttttagcagctcctgttaaatacctgtgggctggtatcggcgatgccatggcaaagcatgtagagtccagctggtctgcaaaggctggggagaagttaagctttggcagtgagtttggtatcacagcaggacagatgtgcttctatccaatggttaaggatgcgaagaaggcattggatgatgcaaaagcaggaagaaacagtgaagaacttgaaaacaccattttaaatattgttgtttccccaggtgttgtatctgtttctgttcatccaaattacaatggcggtattgcacatgctttattctatggcctgaccaagagagagcatattgaaaagaaacatctccacggtgaggtagtttcttacggcacactggtaaatcttatggtagataaggactgggataagctgaaactggcttatggcgtaaataagtctattgacctgcctgtatgcctggctgatctggagctggaaaaggatgacaagttagaggatgtccttgaagcaacaatggcaaaccaggaaatgacccatacaccttatcctgtaacaaaagagatgatctatcaggcaatccaggatctggaagactataagggttaaaaacctagaatgtaagttagagaggatagtaaaatggcagtaaccatacgtgatatacgggtaatctgcacagcgccggaaggcatcaaccttgtggtggtaaaagttgagaccagcgagccgggactttacggactgggctgcggaacctttgcttaccgccacctggctgtaaagctggtagtagaagaatatttgaagcctcttcttgttggaagaaatgtagagaatattgaagatctgtggcagctgatgaaccagaacggatactggagaaacggccccattgaaaataatgctatttccggcgtagatatggcattatgggatattaagggaaaaatggcaaatatgccgctgtaccagctgtttggcggaaagtgcagggaaggtattcctgtataccgtcacgcagatggccgcgatctttccgagctgtgtgaaaatattgaacgtttctatgaaatgggtattaccaatatccgctgccagtgcggtggttacggcggcgaaagctatggaaatacgccggcaactgcaccaaagggcgctcagccaggtgtttatctggattccagaagctatatccgcaatacagtaaagctgtttgaaggcatcagaaacaaattaggatatgagatcaatctggtacatgacgttcatgaacgtattgctcctattgaagctattaagctggcaagagagctggagccatttgatctgttattcttagaggatccggtaccgatcgagcagacagactggttagcaagaatgagagagcagacctccataccgatcgcagaaggcgagctgttcaacaatcctgttgagtggagaaaacttatctcagaacggctgatcgattacatccgcgtacatttaagccaggttggcggtattacaccggcaagaaagctgcagatctttgcagaacagtttggtgtacgcactgcatggcacggacctggagatatgtctcctctggctcatgcagcaaatatccatattgacctggcagcaccaaactttggtgtacaggaatggtccggcattgagccgccaaactttgttatccaggaattaaagggaccacatggtgctctccttgaagtattcccgggactgcctgagtttgacaatggttatgtatatgcaaatgataaacctggtttaggcgttgacttaaatgaggaagaagctgcaaaatatccttgtgagaatactgtgactacatggacacagacaagacgcagggacggagcattgcagactccataaagggatgaaggatcccccgggttcttacaccaatctccccggtttaccggggaaaatcaaaatatatttatacattccgctcccgtatcacgggagctggccaccatatattattataggaggataaaaaaatggcatttgattacaaggaaaaattcagcgtagctggcaaaaagtgcatcgttaccggtgcagcacagggactttccagaggtatggcagaaggtctgttagagaatggtgctgaggttgtattaatggaccttcaggcagaaaagctgcaggcagttgcagatgaatactgcaagatgggttacaaggcacatgcagtagcaggtgacttatccaagaagccagagatcgaccgtatgttcgcagaagctatggagatcttgggaaataagctggatgttatgatccctgcagcaggtatccagagacgttacgagccatgggaattcccggaggatgcatggagactggttattgatgttgatttaaaccatgtatggtttatgtgccagaaggcagttcaggttatgaaagataaggaaggcagcaccggaaagatcatcaacatcgcttccatgaacgcattctttggtggtacaactgttcctgcttacacagcagctaagggtgctgtagcaatgctgaccaagagccttgcatctgactgtgctgaccacaatatctgctgcaacgcaattgctcctggatatatggatactgaaatgtgcgctaacatgactcaggaaagaaaagacgagtgcaccaagagaatccctgcagcacgttggggactgccagatgaccttaagggaccggtactgttcctggcttctgatgcaagtgactacttaaatggtgctgttatccctgtagacggcggattcttagttaagtcatgatgatgtcctcacaggtgggatagttaaatagtacacttagaaaaggggtgctgtagtaagacgatcagtcgggctgcagtgcccctttccaaaatcgtccatttttaaaacacccagggggtgttatgggcttgacattcatggtttgttagttatatcatgaaataacgacggataaacatcaggtatttttgatataattgggaggtggtcgcgtgcgacagacgcaaaaagagaaactgctgccggagcagacagcagagaagataaggggatacatagaaggtaatggattaaaggtaggagataagcttccgaacgaatttcagcttgctgagatctgcggagtaggaagaagtacggtgcgggaagcgatcaagcttctggttttttccggaaaagtagaagtgatccgtggaagcggcacttatattaagaaagaaaaagcttcccaggcatcaccggcggtaaatgatgatcctataggacttcaggaaaacagtgaagaaaatctgttccagactggtctggaatttgtagatgtacgtctgatgctggaaccggaagtggcagctatggcagctaccaatgcagattatgctgattgtcagaaacttcagcagatccagaagaaggtagaagacctggttgtccaaggaaaagatcatattgctgcggatattgagtaccacaggcagttggcagcctgcacccataaccagaccctttgcaatcttatggagatcgtggtaaaaggaattccgatttttgtgcagatgacaaaaaataattttgccaaaacaacagtggaccagcaccaggcgatcacagatgccatttcatctgcagatgcccagggagcaagatatgcaatgatcacccacttaaacagcaaccgcaaacggatcttaaaagtgctgacagagcaaaaatcaaatggaaagttataatcccctgtgttttcattgaaagttattgtcaatttcgttataatagtgttaaaaaacagattgtacacgatcggttcgggggacacattatggaaaaaagttttttgacatggacagcagccgctttaggaacggcaattcttttaacagcatgcaatacgaatacaggaacaactgcgccaggcagcaaggtgaaactggacccaagtaaaccggtttcccttactgtctggcattattataatggggcacaacaggctgcctttgaccagctggtttctgaatttaacgctacagagggaaaagacaagggtatttatgtagaaggatatacccagggatctgtatctgatctggaaaaggcggtttcagatgcagtatccggtgctgtaggtgcccagtctttgccggatattttctctacctacgcagatactgcctatgcagtacagaaagaggataaactggcggatctgtcttcttattttacagaggaagagctgtctgaatatgtggactcttacataaaagaaggctatttccatgatgatacctctctttatctcttccctgtagcaaagtctacagagatcatgatgatcaataaaacagactggaagccatttgcagatgctaccggttcttctttagaggaactttctactttagagggagtggcagacgttgcaaagcgttactatgagtggaccgacagtttgaccccggatatccctgatgatggaaaagcattttacggaagagactccatgtccaattactttattattggcatgaaacagttaggagcagatatctttgacgtaaaggacggtcaggttacgatccaggcagacaaagaaaaagtccgccgcctgtgggacaattattatgtaccttatgtaaatggctattttgcaagtatgggaaaattccgttcagatgatgtgaaaacaggggatatcctggcttacaccggttcttgcgcatcttctatgtacttcccggatcaggtagtaaccgatgaggacagccatgccattgattatgtggtaatgcagcctcctgtattagagggaggcgaacagatcaatgtacagcagggcgcaggaatggcagtgacaaagtcagatgcccagcatgaatatgcctcctgtgagtttttaaaatggtttaccagaaaagaaaataatctccgttatgtatgtgagtctgcctatctgccggtgcgcaaggatgccaattccatggaagcgttagatgaagtgatcaaagaaaaagacctgaaagtaaatgctaaggcgtatcagtgtttaagcagtattttaaatgcctatgagtccattcatttttataccccgaactgctttgaaaacggatatgccaccagaaatatcctggattatgatctttccgacaaagctgcccaggataaagaaaaagtagatgaaatggtagcagccggaatgtcaagagcagaagcagctgcagaatttaccggcgatgctgcgtttgaagaatggtatgacagctggtatcagaagttaaatgacacggcacattccaatcagtagatcctgtatttaaggccggaaacaggatcagaaataagatgagaaatgccacaggcaggaggtttggaagtaaaacatgaaaaaaaagaaaagaacattgatgcatattttacttctgcctcttttactggtggtattatttcagggcatcttacctttttccatgctcctttccagcggtgttaaatccattatggagagtaatgcagtagatcttgacagttatctggtggaaaacagcaaggtaatactggaaaatgccatgatcgagcagtggagtgctgtgcgcaaagagagcaactatctgaatagtgttctttctgatctgttaaaagaacaacgggcagatatagaaaagtttacaaaggataaggaacttcagaaggaatatacccagcgtgtatttccggagcttttagagtctttgcgccgtgataccacctgcggtgtgtttcttgttatggcaaatgatcagccaataggggcaccgggagattttacgggatttttcctcagggactctgatcctgtgaccaaggtagatacaaactctgaccttcttttggagcgcggggataaaactctggcccgtcagtggggaattaccctggataattcctggtcccctgcatttcgttttcagggaaaaggtatcagggaaagtgatgattttttctatgaaccttacacagcaggtatggctcatacaggggtagatatggccagtttaggttactggtccatgccttttatactggaagattatgaaatggataaccataaaatgatcacatattctgtccctttggtcaatgatggtgtgatctatggtgttgtgggaacggaagtttctgtcagttatctgtgcaatacctatttccgtgtacaggatctgaacaggcaacagacagccggttacgccattgccgttgataacggagatggtacgtatgaaaatattgcaggaaaaggtaatctttatgatgcggtacagcgtgaaaatggtatttttaagctggaaagtacaaagcatgaggaccttttcaaggtaaaggactctaagatcggtacccaggagatctatgccctgttttcaaaaatgaatttgtatgccaataatgtcccttataagaatacaaactgggttttatgtggttttgtggcagaggactctattttcagtctgggagataagctgtacagcgatattttgacgactattgtggcctgtgcagttttgggactggtgatcatgagtgtggtgatccgctgcgtaacacgaccggtatacaggcttatggacagtatccgaagcggaattgcaggcttaaaagagtttgcgccttccggtatccaggaagtagatgagctgcatcaggtggttgaaaatctgacagaaagtgagatcagcacagaacatcagctcagtgaagaaaaagagcgttaccggatcgcagtagaaagttccaatgacctgttttttacataccgtgaaaaaggaaatacactggagatcgtaaacagcagggaaatggatggtttgtgggatataaaaaatgccaaaaaaaagatcctggaccgttatttttcaagggaagaccagaaaaagctcctttctatgctgcaaagtcatgagaatacaatttatggtcagttttgctgtatcaatggcaaccactcacagggacgctggatcgagatcagaggaaagaccattgcagagacaaaagaggatgatcgaaagatcgtaggttttgtccgggatatccatgaaacaaagatgcgggaactgaaacaggaacgaaagcagatgatagatcctgttaccttattttaccgtttaaaaccgggaatggaggtaattgagaaggttcgtggaaagtatccccagggtatgtttattcttgtggatatctgtcattttaccatcataaccagggactttggtctgacatttagggatgtggtcctggaagaattttccaaaatgtttctggaggtgtgtgccgaagatctttccagacctccggtgatgatccgtgcaggttctgatgaactccttgcctggatccctaaaattacagaggaaagctgcaggcagaaactggaaaaactgaaagaacgtttttctgtgatgatccggcgcagtgccttaaatcttaatttccaggctggaattgccagaggggatgaaagtgtaacaaccacctctctgttaagacgggtccggatcgctgttacagaagcggaaaagcaggagatcggtgtcctttcctggaatgaggtaaaggatccgggagcacagccgaaaacatttggaaagatcgtttccatgggatatatggaacagatcagtctggcttccctggcattaaatctgttagaccgctgtccgtctattgatgcaggtctggatctgctttcccgccgcttaaaagcacgttatggaatggaaaatatgctgatcaccagttttcattatgatttcctttccagcgagctggaataccagtggaagcatcttcatggcctcatgggaaaacggggcgttgtccactgtacagaagaagagtatgaaaaattaaatcaggatgcccagatcaacgcagtgcagcctgtaaaacagctgttgtccgttgtacctgttctcaggaaaacagatatagaccagaccggtgtggggatccttatgtcagataacggacagtattccggaagcatcttccttttgggaatagaaccatctgtttatgaaaatgaggaggacagaaagcttctctgggagattggcattatcatccagaaccgtatcaacagagaccgtcatgatcagtctgcacaggcaaagtctgacttcctggcccatatgtcccatgagatccgtactcctatgaacggtatcattggtatgacagagatcgctctaaaagaagggcagacagaggaagtgcgtttagactgcttaaagaaggtaaaaggatcctccaaatatctgttaggtctgttaaatgatgttttggatatgtcaaagatcgaaagcggaaagatgaaactggtaaaagatgatttccagcttgataagatgatcggcgaactgtatccgttattggaagctaagtttgaggaaaaatctcagaaatatcatcaggagatccatttggtcaaccagtggttctatggggatgctttacgtctcagtcaggtcctggtcaatctgttaagcaacgcagtgaaatattccggggatcacacggagatcactttaacagtagaggaaacaaggctttctgatggtctttctaaattacagtttgcggtgaaggatcacggcatcggtgtcagtgaagaagaccgccagcgtattttcagaagttttgagcaggtggaccgttctgcggtaggacagcagggaactggactgggactggcaatcagcaaccgcctggtacatatgatgggcggaaccattgagcttgaaagccagatcggggaaggaagtaccttccggttttccattacgttaaagccggtcagagcccaccatgtaaaagaagaagtttccagggtggaaagagattttacaggtgtccgcgttctggtaacagaggacaatccattgaaccgggagatattacagtatattctggaagatatgggaatgtctgtggaaaatgcctgtgacggaaaagaggcggtagataagtttaccgcctccgagaaaggatattatgatctgatcattatggatattatgatgccggttatgaacggactggaggcagcccatgccatccggaccaccgatcatccggatcataaaaagatccctatcattgccatcagtgccaatgcttttgatgaagatatccgcaggtctcttgcaagcggcatgaatgcccacctttccaagccgatcgaagtggataaactgcgggagacccttggaaaactgttaaaataaggacttactgaacaaagggagcaatggtttcttccggggctggctgtgaggtttccggtgcagccggagcagttggcgcgggttctgttggtgccggagctgtctgtgccggggctgtttcatgttttggagcctttttctctgttgtctcagccttagtcggagcagctgcttttgttggatttgcaatagaactgctttcttgtgctccttttgtgctggaggcagttgtatcagaagtagttgtaccggaagtagttgtgccggaagcggaagaagtattgcggtggatcacagcactatggccaagataggttttggagtggtccagagtacgttcgacttcctgtccgtctttgtatacaactttataagtatcccagcggctgcctttggtggccgcttttattgtattttctgttcccggagctaaagtagggtcttctacgtattccggttccggcgggtcgatttcttctactttttcagaagccagatcccatacaaccccatcctctaatacaggcacgccgaaaatagaaacagttgccttgcggtcagcgtagcttgcaagaataccgataggtttgtcagaagtatttacaaaacggaagtcaggctgttcccagctgatggcagcatcctggcccggagttacatagttaggctcgaaagtatgggagcggcggaaggtaacttccatgccggactgaaatactacccggtataaggtactggagatctggcatacaccgcctcccagttcctggacgacagcgccactgttgtatgcggctgcttcctggtatcctttttccgcagtacgctgtcctacaacagagttaaaagaaaattcttccccgggctggacaatggttccgtttaaagcttctgcagcaaggcgtacattggtgttgcgcttatcattgtccgtggtttctgtggtaaaggtgacgagagtcttgtagctggcttttacctcatcacaggaaatagaaggtgcttccttatgggactgtacttctactacagcatccatgcggttttcatgaatggcagctaaaatatcattggccagctggtcccggtcaatacgtgagccggcgcagccttccctgaacacaaactgtcccttctggttgtcatagtggtccagggtactgatctttgaaggaacatcccattcttttgccagttcttccagttcctgggaaatggaatttttcagggcatccgttggaagctctgccgctgttaatgtaagatctcctgaaacggtttcctcttctttactggtaagccagttgcggatggcgtctgtaagaatgttgggaagttccttactgtcatcttcatatgcggcagtcatattccaggaaagagacttactgatccgggaaacagcctcatctttgcttaatccctctaaagaaatgccgttgacagtcagtaagacaggagaagtttcagatgcctggctggcagttgcttttgcggctctttccggttcagaaacagaacgggaatggagtacagcagcggagatgcctaagagtacgacaacagctcctgctgctgcaaaggggatccaacctccttttattggttttcttttcggcctgtcatagtcaaaatgcagccgctttgatgtatgatccttatcccgtcttcctctgggaccatgataggaagagcgggaattcttgtttgaagacataaatatccctcttttcatatgctttttcatatgctttataaagtattttacagattttgtattatataagaagggataagggatgtcaaggcaggtaaatactggtttaaggaaatattaaactaaatgttaaaatgtctggaacaggcgggtcaggaccgtaaaaatgatacagcataaagcaccgcaaaatgccggcagaaaagcagaaacaaaggtccaccatttactttttgtttctttatacagtgtgatcagggtagtggaacagggccagtgcatcagggagaaaagcaggacgcagacagctgttttccaggtccagccatgtaacagaaggatctcttttaactgtcccatattttcaaaatttgttaggcttccctgggctgtgtaggccataaggataataggaagaacgatttcgtttgccggaagtcccaggataaaggcagttaagatcaccccgtccatccccataagacgtccaagagggtctaaaaaccggctgaaacgtgcaagaaggcttatatttcccggagctgtatttgccatgatccacaggagaaaaccggcaggagcagctacagcggcagctcttccaaggacgaaaagggtccggtctgttaccgagcgaaagatcactttgccgatctggggcttcctgtaagggggaagctctaaggtaaaggaagaggaaactccttttaagatcgttgcagataaaaggtaagaggtaataaaagtcatggcgatccctgaaaggatgaacaaagtaagcagcagggcactggcagcagaagaaagcaggccatggctatttccggataaaaacagcaggatcaaagtgataaaaagaggcagacggccgttacagggaacgaaactgtttgtgatcatggcaataagccgttctcttggggagtcgataatacgacagcctgtgatccctgctgcgttgcagccaaatcccattgccatggtaagagcctgtttcccgcaggctttacagcactggaaaggccggtctaagttgtaggcgatacggggcagatagccggagtcctccaataaggtaaaaagaggaaagaaaatagccatgggaggcagcataacggaaaccacccaggcgaggacctgatagaccccatgaacgaaggcgtcccggatccagtctggaaaatgaagggataaaagggcctgatccagtaccggctgaaaggaaaaaaacagtctggaaagcagggcggacaggtcgtttgccccaaccagggtgatccagaagataagggctaaaagtccggccatggcaggataggcagccaggcggcctgtaaggatgcggtccagtttccggtcggtttcattgtagctgcgttccggcagctttacacaaagggaggcaatggtttcagcgttgtcgatcaggccggagacaatgcggtcttttaatatgtctttaaaaatgccttttctgtttaaatgatcccaggcagtttttaagctgtctgcaatggcaggatcctgtgacggaacaagctggcaggcatttgtaaaagaccggagaaaggacggatcatcttctagcaggcgcagggagagaaagcgggaagtggtataaaatggaagttcatgggtatccagccaatttttcacagcaggttccaccatggagactgctttttccagttcagggcagtaagtgacctgatagtggggaatggcaggaccttcagtaatatcatctaaccgctccaagaaagaagaaagtgtgcttttctttctggcagaggttcctgctaccggtacacacagcaggtctgataactgatccagatcaatggtgatgtttttcttttccgcttcatctaaaagattgacacataccaatgtacggtccgtagcttccaggatctgaaggaccaggtttaaattgcgttccagacaggtggcatcacagacaatgaccactgcctgatgaacaccgaaacagataaaatctctggcaacttcttcctctgcagaacgggaagagagggagtaagttcctggaatgtctaccagtgtgtaatcacgggccggactgtggcagatcccccaggcattagctgtggtcttgccgatccagtttccggtgtgctgcttcttcccggtagtaagactgttaaataaagtactttttcctacattgggatttcctgcaagggcgatcacaggatagtgatccggtatggcttttggctgcttcatgctttctcctttctgcagatctggatgtttctgctgtctgctttacggatagcgatcacagctccgcggatctggtaggcagcaggatcccctaaagggcttatcccaacacattctaccagtgtattttcaacgagacctatatcaagaaaacggcgtcggatgctgccggaagaggtaaggcagcagacccgtgctttttcaccaggttttatatcgttcagacaaagaggggaagtcataagaatattacctgcctgggaagttatttgtacttattatatgataccaagggtcaaaaggttaaaaatccgatgcaagcagtgaaaatagctggaaaacttaagaaagatgggttataatattaacaatataggttataaaaaatacaacaggagaaggcagaattatcatggaagaaaattatattgaatggctggtaaaacggaaagatcccgtatatgcctggccggtaaagatcctgatgatcgttgtgtgcgcgttatcagtactggcagcactgcagatgttattgggaattctgatcttggcggcagcagcagcggctacgtattttgtttttctgaatttgagtgtagaatatgaatacctgtttgcagatggcggtttcagtgtagacagtattcttggaaaagcaagaagaaagaaaacgtttgactgcgataaagaagatgtacaggtgatcgcaccggcaaattcctatgttttaaaggattatgaaaagcagggaatgaaagtgatcgactgtaccagtcataacgccggagcagatgtctatgccctgatcagccagaaaggggcccagaccaccaaggtattatttgaaccgggtgataagatgaaggcagcgatgcgcagggtatttccaagaaaatttatctagtgataagtttacctcataaaaaatcataaggaatttcaatgaatattttccgttaaatgggtttgacaatccatataaaatttgctagtattatttactaataagaaggccaaaacgccagtgtctgataaaaccgatgtttttttagcgctggcgttatattgaaccttcatacaaaaattttacagagaaagagaggaaaaatgaatgggtacaattatcggtgaaggcattacctttgatgatgtgcttctggttccatcctattcagaagtgatcccaaaccaggttgatttaagcacaaacctgaccaagaagatccgtctgaacattccgttaatgagtgcaggtatggataccgttacagagcatcgtatggcaatcgccatggctcgtcagggaggaattggcattattcataagaatatgtctattgaggcacaggctgaggaggtagatcgtgtaaaacgttctgagaacggtgttatcaccgatccattctatctttccccagagcatacattaaaggacgccaatgatctgatggcaaaattccgtatttccggtgtgccgatcacagaaggcaagaagttagttggtatcattaccaaccgtgacttaaagtttgaggaagatttcagccgtccgatcagagagtgcatgacttccaagaacctggttacagcaaaagaaggcgttaccttaaaggaagcaaaagcgatccttgcaaaggcaagagtagagaagctgcctatcgttgatgatgatttcaacctgaagggcctgatcaccatcaaagatattgaaaagcagatcaaatatcctctgtctgcaaaagatgcccagggacgtctgttatgtggtgctgctatcggtatcacagctaacgttctggagcgtgtagaagcactggttaaggcaaaagtagacgtagttgttttagactctgctcatggtcattccgcaaacgttatccgctgcgtaaagatgatcaaggaagcatatccggatgttcaggtcattgcaggaaacgtagcaaccggtgatgcaaccagagccctgatcgaagctggcgctgactgcgttaaggttggtatcggacctggttctatctgtactacccgtgtagttgcaggtatcggtgttcctcagatcaccgctgttatggactgctacgcagttgcaaaagagtacggtatcccgatcatcgcagatggcggtatcaagtattccggtgatattacaaaggccatcgcagcaggcggcagcgtttgtatgatgggaagcatgcttgcaggatgcgacgagagcccgggtgctttcgaactgtatcagggacgtaagtataaagtataccgtggcatgggctctattgcagcaatggaaaacggaagcaaggaccgttacttccagactgacgcaaagaagctggttccagaaggtgtagaaggccgtgtagcttataagggtatggtagaagatactgtattccagctgttaggcggtttacgttccggtatgggttactgtggagcaaaggatatcccaactcttcaggagacaggaagatttgttaagatctccgcagcatccttaaaagagagtcatccacatgatatccatatcacaaaagaagctccaaactattccattgaggaatagatatgagtgcagaaaaaaacaagcggctgcgttagcagacatttgtttttttcaagccattcacgaagattcagcctgcgtgagcagacagtggagcgcgtcagcgcgggaatctgagtgttagacgaaattcatgggtcgccgcgtttgcggcggctctttttgggttatgggccaaaagccgcagaccgggctttggctcattgtaatgtatttgaaaaagaaagcaggaacataaattgggagaacgctccaaacttacaacattatgttatatagaaaaagatgacagttatctcatgcttcacagagtcagcaagaaaaatgatgaaaacaaggacaaatggattgggatcggcggccattttgaagaaggggaaagcccagaggactgtcttttaagagaagcaaaagaagaaaccggtcttacactgacttcctggaaattccgggggatcgtaacctttgtttccgatgtgtggggaacagaatacatgtgcctgtatacagcagacggatatacaggggagatgatctcctgcaacgaaggcgttctggaatggatcaaaaaagaagatctgttaaaactgaacctgtgggagggcgataagatatttttaaaacttttacaggaaaatgcaccgtttttctccttaaaactggtgtataaaggggatgaactgacagaagctgtgttaaacggggaaaacttaaagaaatcgtaacaaaatggcttgtttttttgtaactgcgtgtgtgctataatgtaatgagcgcagggaaaaacaagcggctgcgcagcagacatttgttgccaagcatgtcgaggaggcgccagtgacgcgtccgctgacttttcacaagccattaacgaaggtcccgcctaagtttctttcaaacaccacagagaggacatatcccaatgaaaaaacatagatcatcccagtttcttgccatctgtacagcggctgttcttgcgctgtctgtaccagcatgggcaagtcaggtttccattactcctttagatacaggaaatacaacttcttcccaaagtcagtccggggcttcagaaccttccacagcgcagaatacttccgggcagacagtggacatttcttctattacaaagccgaccgttgcatcccagggcgcagttttattaaacgcagcagatggaagtgtgcttttttccaagaatggggatacaacctattaccctgccagcattaccaagctgatgaccgctcttttagtagcagaaaactgtaatctggacgatacagttaccttttctgcaacagctactacaaacctggagtcaggagctgtttccattggcatggcagaaggggatacgatgacggtacgccagtgcctgtatgcactgctgttaaaatctgccaatgaagtgggaaatgccctggcggaacatgtggctggcagtaatgcagcatttgcggagaaaatgaatgcaaaagcagcctctttaggctgtaccaatacccattttgcaaatccacatggtttaaatgatcccaaccattacaccacacctcacgatatggctctgatcgccagagctgcttttgcaaatgatattgtaaaaacagtggcatctaccagaacctatacacttccggctacaaaaaacaatccttccggtcttaccgtgactatgggacacaaaatgttaaatccaaatgatgcccgttattatcagggaattattggtggaaagacaggatatacgtccaaggcaggaaataccctggtgactgttgcagagcgcaacggggtaaggctggtcgcagtggtgatgaagagccagtctacccattatacggataccaaggcattgttagattatggatttaagctggcagaggcaggtgctcttacaggacagagtaccagtcagaacaatacgcaggtttccggcccggcttctggaaagaatgcgtctgataattccagcagttcttctaaccaggcacaggaaacacagggaacgacagttactcctgcaggtcaggaaacagcagccagcacaccggtgcatgctgtatcttcaggaaataataccggaggtccgggcgttaccaaagaacgtggatgggtgaaagatgatatcggctggtactatgtgaagaacaatggagtaaaagcttctaatgaatggatcacagataatggagaagaatactggatccaggcagatcactacatggcaaaaggctggaaagaaatcgatggtaactggtattatctgtgttctacaggaagtatggcaaagaatgtatggaagacaggggcagaaggtaactggtattacctgggtccggacggagtcatgcttacaaataccaagactccggatggttacagagtaggtgcagacggtgtatggatccaataatgtttgtaccggtgttattgtcaggcaacctgtttatgtagtttgccatttataataatgttctacgaattttaaaaactgctttacatagggttttaatatcctgtttttgctgtatacgatgtaaaaagtacggacctgcgcagcactctccaatggaaaggtgagaagctggtgggtcctttccatatcttttacactgcgggcagagagaatggaaactccaaggccggatacaatagattttttaatagactccaggtcattcatccgggctacgatgttaagatcggaaagattgatctggtgccgttctaaaaacagatcgatctccttgcgggtgccggaaccattggcgcgaaggataaaaggatgggataaaaagtgttttaaagccacaggttcctctttttttaatgtatcagccagttccaggtattccggtgttaccggggctgccatgactaaagagtcggtacagaagggaataaaacagcagtcctctgcatctgttttagaacctgtaagaccaaaatccacagcgccctggatcactttttcaatggcgtcagcgctgtcagactgccagatatgaaaatggatatccggctgtattttggaaaactctgacaaaagctccggaagaaggtaggaagaggggatcgtggatgcactgacatcgatcagtttccatttattcccaacaaactcatccgtgatctgattccgcatatttaacatatggactgcacattcatagagctgcattccacggtctgtaactttcatctgtttggtggtacggatgagcagacgggaattcagttctttttctaatgcctggatatgggaactgatcgttggctgggtcaggtagaggtgtttggctgcctcggaaaagcttttataatctacaacggccacgaaggcctctaattgtttgaattccatgggtgtgactccttttttcttcactcattacattatagcataatttatagataaaacctataaatacccacaaaatcatccaatatctgattagatattgagaaaaattaatgttaaaatgaaaacaaagagatttaaggggtgaagtgacatgtatcaggtggggatcgatataggttccagtgcggcaaaaaccgtggtgctgcgggatggagaaatatggaagaccatggagatggcaacaggattttccagcaggaaaactgcagatgagatctatgagtggctggaaaaagaacaggtagcaggggaaggcacccggtacggagccaccggttatggacgagtatctgtgccttatgcagataaagtgataacagagatcacctgccacggaaaaggcgcctggaagctgtttggtaaggacggagtcgttattgatatcggtggtcaggatacaaaagggatcgtattaaaaagcggccgtgtgatgaaatttgttatgaatgataaatgttctgcaggaaccgggaaattcttggaagtcatgaccaaccggctgggactgacgcagaaggaactgtcagaattggcttcacagggcaaagatgtaactatcagctctatgtgtacggtgtttgcggagtccgaggtgatcagccttattggaaagggaacttccagggaagatattgcctatggtgtggtggagtcggtagctgtaaaagtggcacagcttatctcgcagttaggaggaaatcactattttctcactggtggactttgtgaagatgaatatgtgatcagccgtttaagccatgcgttaaatgcacctgtggaaagtatgcctttagcaagatatgcaggagcgatcggggcggcgttgttgtcaggggaataaaaaaatcttttcagaggatcaatcacagagagattttgagagaacattataaatatcaggaggaattataatatggatctgccaaagacatttgatgagtttgtagacgcaagaaaacagggatttataagagccaaagaatttaaagacaatgggggaaaactggctggctgcctttgttcctatacaccacaggaactgttagatgcagcaggtgttgcaacggtaggactttgcggaaccagcagtgagaccataccggatgcggaaaaagtccttccaaagaatttatgtccgctgatcaagagtacctatggttttgcatattctgaaaaatgtccttatacctatttttcggatattatcatcggagagacaacctgtgatggtaaaaagaagatgtacgagctgttaaatgagatcaaagaaacgtatgtacttcatcttccacagagccaggagcgtccttatgcgaaagatatctggtatgaagaagtaaaactgttaaaagagaaactggaagagaaatttaactgtaccattacagaagaaggtctgcgaaaagcagcccatgtgcgcaacgaactgcgaaaagcacagttagatatgtatcatctgcagaaactggtaccgccagccatgaagggaacggaaatgatgatcgcccttcagcagggaacctttacttttgatgtttatcagcagatcgataatatccgtaaacgggtaacagaggcgaaaaaggcttacgaagaaggaaaacgcccggtaccagcttctgcaaaaaggatactgcttaccggatgtccgaccggtggcgtgatccagaaggtgggaagtgtgatcgaaaataatggtggcgtgatcgtcagtctggatgattgttccggtgaacgtaccaaccgtctgctggtagatgaaaacgcgccggatattctcagagcgatttcagaccgctatctgtccattaactgttctgttatgacttctaacaacggacgtttggaaaatactgcccagatgatcagggattatcaggtagacggagtagtggagatcgttcttcaggcctgccatacctttaatgtggaggcctttaaaatgggccgtatggctgaagaaatgggtattccttacatgaaactggaaactgactattctacagcagacagcggacagatcgaaacacgtattgcagcatttatagagatgttatagaccggatcgtagattactggaaaaggctgctttgctaagatggacacaaaaaagactccttgtacatattctatagtaacaaaagaaaataaagcgtctgttttcacagagacggaagatggatgaaaatggaattggaaaggagcctgaatatgtgttttgatgatcttgacggaaggaatgaatttggaagacgtcccggctgttgtggaccggatgggggcagaggcggaaactgtggaccgtgcagcggaagccccggaaatggcggtccggatggttgtgggccaggcggatggagaccggatccatggagaccaggctgtggttgcacaggcagacctggtccaatgggacctccaggaccacggggaccacagggatttcccggatacccggggccccagggtgagacaggagccaccggggagaccggtccccaagggccggcaggagagacaggagctacaggaccgcaggggccacagggtccgataggtgaaacgggagcaactgggcctcagggaccacagggtgagatgggagcaacaggtccacagggagcaaccggcccacaaggcccccagggcccagaaggtccaaggggcgagaccggtcctcagggcccggctggtccggcgggaaccgtcacaccggcagcagctgttgacgatgccaccagcacagaagacattgtaacccagttcaatctccttcttaacagcctgcgggaagcaggactgcttgaaaccgaataaacgtaatttcaaagaccgccggccatttgtggtacggcggcctttgcttaccctgcagctcacaaacagaagccacccgtctttttatataaaaatgtaacacacttgaagcaaaagaaatttcgtgttatatttacttccagtacaaaagcaggccatgtaacagcctgtgtgaccatttcaaaagcagaaaggtgttatataaacatggaaataaacgtaggaaaactgaatgaacttccggagggaagttatcagttgatcgatatgagaagtgaccgggattttgagtacggaaccattccgggagccatccacatttcacaggaagatctgcagggtaatccacagatcataaaatcaaaaaaagtgatcctgttctgtgcccatggaaccaacagcatagaagcagcagaggaactggaagcagaaggctaccgtgcctacagcctggaaggcggctatattgcatggttgcgggaagagatgcgcagacaggaagccgaagatattaaaaatcaggtagagcagagcatccgcaaaaaatttcgcaaaaccatctggtccccgtttaccaaagcagtaaaacagtatgaactggtaaaagaaggagataaagtagctgtctgtatttccggcggaaaagactctatgcttatggcaaagctgttccaggaattaaagcttcacaacaagttcccgtttgaagtggaatttctggtcatggacccgggatacagtccggacaaccgccatgtgatcgaagaaaatgccagaaaattaggtattccggtccatatttttgagtctgacatctttgatgcagtctacaccatagaaaaatccccttgttacctttgcgccagaatgcgccggggttacctttacagttatgcaaaggaattaggatgcaacaagatcgctttaggacatcattatgatgatgttatcgaaaccatcctcatgggcatgctctacggagcccaggtccagaccatgatgccaaagcttcacagcaccaactttgaaagcatggaactgatccgtcctctgtatctggtaagggaagatgatatcaaggcatggagagattacaatcatcttcatttcattcagtgtgcctgcaagtttaccgacacctgcaccacctgcaacaacgaagaaaaccgttccaagcgcgtggagatcaaggaactgatccgcgaaatgaagaaaaagaacccattcgtagaaggaaatattttcaagagtgtggaaaatgtaaatctggatactgtggtctgctacaagaaagatggagaacgccactggttcttagatgattatgatgagaaataaattaaaatactaagttagtaaagagaggctctgttccaaaaggatagagtctttttttatgtactaggaaattccgttggaactccctagtacacaaaaaggcacgacctgccaacgatgcgcactcgcgcgatgataaagtttgtcgcaagcgaccgcgctcggcgcgagaatgtgccaaggcacattcttatttattttattcactattttctctttttccgtatatcatatagtgttcgatgtattttcggaagcaggaggatatttatgaaaaagagatataaagcgctttttgcagccctgttaacaggagcacttgcggcaggctgtcttgcaggatgtgggaaaatggatggtactgcaggcggaaaaatgaaaaaagtgacccttaacgaagttgcacattccattttttatgccccccaatacgctgccattgaacttggctattttgaggaagaggggatcgatctgactctggtaaatggagctggcgcagataaggtaatgacagcccttatttccggtgatgcccagatcgggtttatgggatcggaagcaagtatttatgtaagtcaggaaggggcggacgatccggcagtgaactttgcacagctgacccagcgggcaggtaatttcctggtgggaagaacggcccagccggattttaaatgggaagatctgaagggaaagaaagttttgggcggaagagcaggcggtatgccccagatggtatttgaatatatcttaaagaagcatggcattgaccctaaaacagaccttaccattgaccagagcatcagtttcggattgactgctgcggcatttacttccggggatgcagattatacggtagaatttgaaccttttgcaactacactggaaatggaaaactgtggcacagtggtagcatctttaggccgcgactccggctatgtgccttataccgcttactgtgcgaagaaaagctatatggaaaaaaatccacggctgatccagaagttcaccaatgccatccagaaagggcttgattatgtaaattcccattctgcatgggagattgcaaagaccatccagcctcaatttaaagatacaccggtggaaaaaattgctgctattatagaccgctacaaatcacaggatacctggaaagaggatacaatttttgaaaaagacagctttgaacttttagaaaatattttagaggagtccggagaactgaaaaaacgggtgccatatgaagatctggtgcgtactgatttttcaatcaatgcagcaaaaaagtaagcaaacagaatgctttgcaattatttgcaacaaatgttgaaatcgattgcaaaaatctcttgacaaaaccctataagaaggcgtatgatgaagtcatcagagaaacaggagagggaatatgacgatatacgacattgcaaagcaggcaggtgtgtctgcaagtaccgtttccagggtcattaacaacaagcctgggatcaatgcccagacgcgcaaaagggtacagaaattattaaatgaaaatcattatactcccaatgaagcagccagaggcctggtgatgcagtcttccaagatcatcggtatcctgatcgaggatctgcggatcgagcatcatacagagtctgcttatgtgatcgagcaggagatgactgccttaggttatacctgtattactctgagtaccggacgaagggatgagaaaaaagcggattacatccgtatcctggagcagagacgggtagacggtgctattcttatgggttccatgtttgagacggaagctgtgaagaagagcattaaagagcaccttccggatgttccggtagccattgtgaacggttatctggatctgccaaatgtttacggcatcctcattgacgaggagcggggcgtgaaagactgtgcggaactgatgtttaagaaaggaaagaaacatctggtaatggcagttgactccgatacaccatctaaccggaacaagcaaaaaggctacctgagagctatgttagaacaggggatcgccaaagaagatatcccgttctatacagcggtaaataaagaatttaccaatccccgtgatgtgagggcggcaggtgcaaaacttacagaacagattcttacagaaagacctgaaacagacggtattatctataccacagacctgttggcagtaggtggcctggaagcagcaaagaaaatgggaaagcgtattccgcaggatcttgcgatcatgggaatagacaacaccatgtatggcgagatcgttacaccaaagcttagcagtctggacaacaaactggtagaagtcagccagaatgcttcaagggcgatcttagatgctcttgataaaaaagaagtatcccataaagtgatgctgctgacggatattaaagagagagaaaccacatagcatttgcaaaaagcaaaagtcattgacagctttttacagatgcctggtataaaaaagaaaaggttcttccaaaaagaaccattttcttttaacaacactgaaatcgattgcgaaaaaaaagcaattcaaagaaagtataaaagataaaggagaaagagatcatgaagagagttccttatgaggtaatggtaaacgaatttgagagagtattaacaaagtatggttttgagccaaaggatgcaaaggcttccgcagagctgtttgcacagaactccatggctggtgtatattctcacggattaaaccgtttcccaagagtggttgagtacttaaagaagggcgagatcgatccaaaggtaaaagctgagaagatcatgggatttggagcttttgagcgttgggacggacatcgtggtttcggacctttaaatgcaaaactggctatggaccgtgcagtagagctggcaaaggaatttggcatgggtattgttgcactgggaaataacaaccactggatgcgcggcggcagctacggctggcaggcagcagaccagggctgcatcggtatctgctggtccaacacctgcccgaatatgcctgcatggggcggtatggaccgtaagatcggtaacaacccactgatctttgcagtaccaagaagcaacggcgagcatgtagtgatcgactgtgctgtatctcagttctcctatggaaaactggaagactgccgcttaaagggacagcagctgccagtaccaggcggttacgataccaacggcaacctgaccactgatccaggcgagatcgagaagacctggcgtgtacttccaatgggctactggaaaggaagcggtatctcaatcgctcttgacctgatcgcaactgtactttccaacggaaactccgtacagaagatcggtaccttcggcgatgaagtaggtctgacccagatcatgatcgctatcgacccaaccaagggcaacagcgtagaactgaccgatgagatcgtaaacaacatcgtagcagatgtaaagagttccatccctgtaaaagaaggcggagaagtttactacccaggcgaactggaactgttaaacatcaagcagaacaaagaagaaggcatcccggtaatcgaagagaagtgggaagaagtattaaatatgtaatggtcccagaagaaaaacaagcgacaccgcaggtggcatttgattttcttggaccattaacgaacgaattgtctgcgtaagcagacggtagagcgcgtcagcgcgggaaacctgagtctaagaaatccccctaaaagagttgacgcagctctcatttcagcgtatgatggaaagtgactgacacaaagactgtgcagagcactttctgagtgaaagacgctgaaaataaaatgacagaagacaaggagttttccgcctgttttgcaacccagaacagctggtcatttcctggcagcggcctaaaacgaggtctgcttttcctgtcatataaaagaatacacaaataccctctttgggcttttgtgtctgtatttcgcgccttttaacgtgtcatacagtcgcaaaaagcagaaagggggtatttttttgcataagatccggaataagggcactggaaagttaaagaattttataaaagcctgtgttccggcactgatccttctgatcctctggcagctggcctttttgtcaggaaaatggagtgcttatgtgcttccgggaccggaaaaagtgtggaagtcctttgttacaatgacgggaaacgggacattgcttaagcatgttctggtaagttttaagagggtcctgacaggtttttccatttcttttgtctgtgcgttctgcctgggaatgatcgctgctttaaagaaagatctggaagtttactatggtccttatgtggaatttatgcgcaatgtgccgcccatcagtttgatcgctcttttgatcctgtggtttgggattggagagacatccaagatcatcattattgtattggcgtctttttttcccatgtttatgaacatccgaaaaggccttctttcctgtgataagaagcttttggaagtgggaaagacctgtggtttgtcaaaaactgcctgtttctttaaggtccgtcttccctgggcatttcctgatattttagtgggaatgcgcatcggtcttggatacagctggcgggctattatcggtgcggagatgatcgctgcgggaaaaggccttggatatctgatcctggatgcccagcagatgtcccgctccgacaaggtgatcgtagggatttttgtgatcggtctggtaggtctgctttgcgataaggcatttttgtggatcataagaaaatgggtccggggaggtgtggaaaatagctgagatcagattaaaacagctggaaaaaagctttgaagtatcaaaaaacagtcatccggtgttaagacggttttccacagatctggatacagaaaagatcacggtgatattagggcgcagtggctgcggaaaaaccacgcttctgcggatcctggcaggtcttgaaacattagatggcggtcagatcctttttgaacagcctgaaaaactgggagtggtttttcaggaaccccgcctgatgccatggcttactttagaacaaaatattttatttggggcagacaaaaagaaacattcaaaatcaaagttaaaagaaaaggcagaaactcttttaagacttacaggactggaaaaatttggaaaagcttatccggaccagttatcaggaggaatgatgcagcgggcagctctggcaagggcattagcctgtgatgcctcgtatctgctgatggatgaaccttttgcagctctggatcattttaccaggcagaccatgcaaaaggagtttttaaggatctgcgcagaagagaaaatgggggcgttgtttgtcacccacagcgtagatgaggccctgcttttaggggatgagatccttattatggaaaatgggaaggtaggaagctggtttacgattggagaaaatctggcatatcccagagacctgttgtcagaagaaatgatcggcattaaacgaaagatcattaaaacactggaaaacaggtcacaaacgcaaaaaaacttttaaaacctaacataaaaaacgggagaaaatgaaatatgaaaaaatggaatgtttatgcagcagcagtgctggcagcagtgggaattttaggaggatgcggtgctaaaaatgcagaaagccaggcaccggcagaaacgcaggctgcagagcagagcgcacaggaaagcagcgtggaagaaagcagggagaccagtgcagaggagtcaaaaacagagacagagaaaaatggaaccctgtctgttacctatgtaaagtctccattaaatgttcccagtatcgtagagcaggatcaggagatctttgccagtgtatttggtccgatgggttatgacgtgcagtattcagatctgacaacaggaccggagcagacacaggccttagcttccggagatatccagtttttaaatgcggtaggcgctacttctgtaattttatctgcttccaatgacgcagacattaagatcatgagcatttacagccgttccccaaaggcatttaagctgtttgcaaaggatgacagcattaagacagcagaagatttaaagggaaagaaagtagcaggtccaaagggaaccattttacatgaactgttagtatcttacttaaataatgcaggtatgactgaggacgatattgaatttatggcaatggggatcccggatgcccaggcagctttggcaggtggaagtgtagacgcggctcttcttgcaggtccgactgcctacaatatggaaaaagacggattttatatagtgacagacggagaaggtcttacagaggcaaccatcgttactgcaaccagtgaaaaattctacgaagaacatccggaactggtaaaagcatttcttactgcacagaaacaggtgttagatgaaatggacgcagatcatgcagcagcagtttccgccactgcaaaggcaaccggtttagaggaagcagcagtagaagaaatgtacggactttatgattttgatatggagatcaaagacagtgatattgaagccatggaaaaaacagagaagttcatggaagatacaggcatgatcgaaaatccggtcgatgtggcatctctgatcttagatgtagagtaaatgattgtggtatagagtctgtatgtgatataatgggttcaaaagaaaaacaagggacaccgaaggtggcatttgtttttcctggcccattaacgaaggtcccgcctgcgtcagcaggcagtagagtgcatgagcgcggggggacgtgagtgaaggggctgttataaagtggtagtaccattttatgacagcctttttgctgcatttaatttaattaaaaatgaaaaaccgataaagtgaggataaatatggattataagatcatcgtcctggatctggacggaacattgacaaatagagacaaggttattacaccaaggaccaaagaagccctgatgaaggcacaggaagcaggaaagatcgtggtgctggcatccggccgcccgacagcaggcgtggaaccactggcaaaggaactggatctggcacgttttggaagctatattttatcctacaacggcggcatgatcaccaactgtaaaacaggagaagtgatcttttcatccctgcttccggtggagtcaaacaagaagatcatggatctggcaaaggaatacggggtggattttctgacttatgagggcgaggagatcattaccaataatgaccagtgcgtttacgcccacaaagagtcaaagatcaaccatcttcctctgcgccaggtagacaacatggaagagcatgtaaatttcccggtagcaaaatttcttctcttagatgacggggattacctggcaaccgtagagccaaaggtaaaggctgccatgggaaagaattttgcagtataccgttcagaaccttatttcctggaagtgcttccgaaaggcattgacaaagcccagtctttagagcgcctgctgcagcatctgggaatgacaaaagaagagatgatcgcctgtggggatggttataatgatctgaccatgatccagtatgcaggtcttggagttgccatggaaaatgccgtccttccggtaagaaaggcagcagactatattacagcttctaataatgacgatggtgtgggactggtagtagagaaatttatgctggcttaagatcgtttttgcaggaactctgcaatcatacaggagatgaaaacgcatatgagagaacttctggaacaatttttcaggcattatctgagagagcggaatttagaggataccctggctcttcttacggaccaggtgataagccttgggaccggagaacaggaagtggcaagaaataaagaggaactgcgtgctttaatggaatgtgaatttaaagaaatgccccagcctcttgactatgaactgtttaactatactgaaaaccctctgggagagtatggatggagtattttcaccaatgttctggcaaagattgactcagaaggtgtaacaatggaaatgcttacccgtcttacctgcatttgtgtgaaagaggatggaaaatggaagatcgcctctttacatatgtctaccccaactgtagagcaggaacatcaggaatttttccctctccgttatggcaggaataacagtgtccggaagctttcttctgaaaccggcgaaaagctgatggaactggtgtcagaagcccttcccggcggtattatgggcagttatctggaagaaggatatcctctttataccattaatgataccatgttaaatatattaggatatacctatgaagaactggtggatgccacaaatgaaaagatgatgaatatcatttatccaccggatcagaaatgggtggaagagagcatcgagaagcagtttcatgagaaaaatgaatataaggtggaataccgtatagtcgggaaaggcggccgtatcatctgggtcagtgatattggaaagaagataaagtcagaagacggaagagatgccatgatcagtattatgaccgatgtctctgaccgtattgagcgggagaaccagctgatcaaagaagcacagttagatcctcttacaggactttataaccggaaaagggccatcagcttaatagaggcagactttttaaaggaaaaaagcgggactctttatatctgtgacgtagataattttaagagcatgaatgacacaaaaggccacctggcaggtgacagggctttgatccatctggcaaagctgatccggcattatgcagatgagaactgtgtaacagcacgactgggcggtgatgagtttatgctatattttacggaagatgcagagaaaaaaggcgctgatgttattggaaagatacaaaaagagtttgccattgccatgaaaacgtccaatccggatctggatattaccatcagtgcaggcggagccttaagaaacgcaggggaagattttaaagatttatataaaaaagcagacactgccctttatctggcaaagaaggaaaaagggcagctgaaaatttataaggagcagtagcagcctgcttttaggatcagttcataaagtggatctgttctgtggtaacaggtgtaaaacgggccagttcctgtccgttcaggtcggtcttatgcatgtctacagcgctgatctggtggttatcataggtggtataataataaattccctttgtggcattgcagcaggaggtataaagagtaatctcatattttccctcagttacttcgcagcagcctctttgctggtctacagaacctaaaatatggaaaaactggctgacgctggaaagctcatccccattgcatcgggaattcatttttacataagaagcccggacaaaacgggaggaagaggacagatctccgggaagtcctaaagcgcccattccacggctgtaggtatttaaaggcagatcctttgaaaatgtatttactggctgcttcggtgataagtgcatatagttatttaactgaaacatctgttgcggaaaaggaggattgttggtcaggacacctgctgggttgtcatagatcatcagtccttcttttactgcttctacggtaatagagccggtctcatcggcaatgagccagtggagacttcctaccggaagctgcgggctgaacggtgtgtctaccaggtccatgttttttaaagcttcttttgcctcttttaaagaagcacaggtacccaggataaaggggatcagttcaaactgggtaatctgttttttgtcagagtctgggttcacaggcttatatgttgcatttccaacaaaatttaagcctgcgatgccaagacctttttcgttgatggcatcataataaagaggatagtttcctgcaacatgggccatgccaatgatagcatagtggttttccagctttccgccatgacgcaaagtaaaggagtaatttcggggagtgactgtgatctcatccccataagaaaattcataatccagggtccgtcccatgtaaaaatcgttggttttgtaagttgcggctgtacacatgtaagttgtcctttctgttgtgttgttttcggatcatcgtccggtgccatatccgccaacggcggatacggggaataaaacagtgcatttgcccgtcacaggcgggaaagattgtagttatatatagcaaaaggctgcagcagaatttgaaattattctgccacagcctttattaaatatgtaccggaccagcccatggctgaactgtaacgtttattatactcttgcgataccctcttcaatagcagtatcagcaactgcctttgcaactacatcagcaaccttcttgtttaatggggaagcaatgatgttttccggagtcagttcctcatccgggatcatgctggcaattgcgtaggaagctctctgcttcattaattcagtgatttcttttgcacgaacagaaagagcgcccttgaatacacctgggaataccaggacgttgttgatctggttcgggaagtcggaacgaccggtacctacaacagcagcgccgccagctaatgcttcatctggcatgatctcaggagtcgggtttgccatggcaaatacgataccgttgttcatggtagaaaccatttcttttgtaaccaggtttggacgggatacaccgataaatgcgtcagcaccctttaaagcatcagccagcttgccgtgctcatgatttaagttgctgatatgggagatctcttcctggcctggatttaagccttcatcgccctcgcagatgataccgttgatatcacacatgatcacattgccaaagcccatgttgatcaggtgtttgccgattgcgataccagcagctccagcaccgttgatgacgatctttaatttgcccatttctttctttgttacttttactgcgtttaataatgcagcagcaactacgatagcagttccgtgctggtcatcatggaataccggaatgtcgcacatttcttttaagcggcgctcgatctcaaagcatcttggagctgcaatatcctctaagttaataccgccaaagctcttggagatcagataaatggtctgaacgatggtatcggtgtctttggagtcgatacacagtgggaatgcgtctacgtcagcaaattctttaaacagggcgcattttccttccataaccggcataccggcagcaggaccaatatctccaagacctaaaactgcagttccgtctgtgataacagctaccaggttggaacggcgggtcagcttaaaggactgctcataatcctttgcgatcacgcggcatggctctgcaacgcctggtgtataagcaagggaaagatcctctctggtttcgatctttttacgggaaattacctcgatctttccgtgaaggtcatagtgcatctgaagggaagcctgattgatatccatagtgtgttgtctccttatgataattatttatacccatacgcccaacaggtgggcgtatattaacaatagttataaactgcaaagcatcgcttataccatctgctccggatggaagatctcatcaaatttctcagcggtcaaaaatcccagctctacgcaggcttctttcagggagatgttctccttataagccttctttgctgttttcgctgcattttcatatccgatatatggatttaagcaggtaacaagcatcagggagcggtggaggttttcatccatcttctcacggttggcatggatgccgctgacacagcggtcattgaaggaatttaatgagtcagtaagcagacgtacagactgcaggaaattgtaaatgcataccggcatgaacacatttaactcaaaattaccctgggaagctgccatacctacagcggtgtcattggcaatgatctggacggctaccatggtaacagactcacactgagttggatttacttttccgggcataatagaactgccaggttcattttcagggatgaagatttctccaaggccacaacgtggaccgctggaaagccagcggatgtcattagccatcttcatcatatcggcagccaatccctttaaggcgccgtgagcgaagaccagttcatccttgctggtaagagagtggaatttgttaggtgctgtaacaaagtctttgccggtcagttcagcaactgcctttgcaacctctgtatcaaagcccttaggagcatttaaaccggtacctacagcagtgccgccaagtgccagttcgtgaagtccttttaaacttaaagtaagcattgccttggatttgatgagcatttctctccagccgctgatctcctgggagaaggagatcggagtagcatcctgcagatgggtacgtcctgtttttacaatgccttcattttcagccatcagtcttgtaaaagtatcggttaaacggtcaatcgccgggaacagcttgtcctcgatctccataacggctgcaatgtgcatggcagtcgggaaagtatcgttggaactctgggacatgttggaatggtcatttgggtgaaggagtttttcacctgcaatggcatttccacgtcctgcaatgacttcgtttacattcatattggactgggtgccgcttcctgtctgccatacagccagtggaaagttgtcatccagcttacctgccagtatttcatcgcaggcctgtgaaataagagcaaggcgcttatcatccagttttccaaggcggttatttgcaatagctgctgccttttttaaaatggcaaaagcacggattacttccatggggatcttttcggttccaatagggaagttctggaaacttctctgggtctgggccccccagtaacggtcagccggaacctgtacttcgcccatagagtcatgttcaatacggtattccatgaataatcttatcctgccactcaaaatgtgtgtaaatatacgcacatcgagataatataggttctcacgaactctacttactgcttcatcgtgtatgcttttgattgaccgaaatcatatctacttgcaggttcttgtacactccacagtcgttaattcccgaataagccttcggtacgtacttacgtttgcgtttgactatgcaacttcgtaagttatagcatctctcaaattaagtgcagcattaaagtccctgtcttcaacataaccgcattcgcatctgtaaattctatccgaaagttttaaatctctcttgatgcgaccacagcggtgacacatttttgaagatggataccatctggctactactcttaactcaataccgttttcattacatttagatggaagtttagctctaaactcataaaacttctgtgatgcaacggattttgaaagatatcggttcttcatcattccttttacatttaagtcctcaatcgttatataagatggtttggtttttactatctcagcgattgtcttgttaatgtaatctgtacggacattatctatcttatgatgaagtttttgtaccttgagcttttgtttctgtatatttgctctttgagtgacttctcctttctttaagttttcatactttcgagagagacgcctttgttctcgaataagttgcttttcaagtttctttaatcttgcagatttgttaatgttcttatacgttttaccattggaaacaatagcgaaatcctttaaaccaaggtcaataccaattccctcgttagagttattagcaatctgggcatcaggaatttccacaagaacggaaacataaaatttgtcagctttgattgaaactgaaccacttttgattatatatccatctttggttgttggaatgtatcctttttctttgatacgtacccaacttaaagttggaatgttgatacgatgcctttcgcaaaaacagtcctttggattattcttaacgaagtacatcttcacatcagatttacctttctttttgtaattagggaaagcactctgatgtttgaaaaatcttgtaaaagcagtacacccgcattcgattgaatgctttacagattttgaacttacttccttaacccaagaatattctggatggtttggaagatactcgttgttaagccagacactaaacgatttaccactcataaactttttgccattatcataaagttctttattatgagtaagatagaagttatagatgtacctacaagttcctatcgtcttgcgtatcttgattttctgctcttctgttggatttatttccgtcttgaagctctttagcaatttcctcatccctttctatttgttttttatatttacgaagtccatataacctacaagagaatacacggagtattgaaacaatatcctgcacgagttcttcttgaggcgatagttcttcattgtttactaccactatggttgtattgaacttcatacagaatttttcaaaccagtcatagccaaatcggataaatctatccttatgagttatgataatggttttgattttctgttccattacttcatctaataattcgttccatttcttgcgattgtaattaagaccgctcccataatcttcaatgcattggtctacgataatacctttagcattacaaaactgtcgtagaaatgtgacttggttttgtaaatcatttttttgatttcttgtagagactctggcataaatgacaacttgacgcgtatcatcttctgtatttatgcctttgaattgaagatattggccgtaagtgtaataacgcctatcagttggagtacgatttgcttttagagttccttctctatcccaacgctgtaacgttttgacagaaacacctagcaattcagcaaaatcttttggcttgtaatttgtgatatttgatgtattcatagtatacctctatgagtatatttaaacacatattatcacatttgacaacttattcagttacttaaagttttctccttacagtttgagtgtgctttcacaagggttcagaaagcacatcaggatgttcgttcctagtataccacacatttttccgggggaatatatggattttaagaaaaggtcatgaaaagatatagactttagatatggactttcagactttaatatgttaaaattatacagacgtaaaaaattgtattatttttaaaacgaccgtccgggggcggtaacgtatataaggagcaaaaatcatgaataagaagatcaaaacagaagccgtagatcatttatttgacgcgatcctcacgctgaaagatccggaagagtgctacaagttctttgaggacgtatgcaccatcaatgagctgctgtcactgtcacagcgatacgaagtggcaaaaatgctcagggaaggaaagacctatcttgagatcgcggaaaagacaggagcatctacagctactatcagccgtgtgaaccgttcactgaattatggaagtgacggatatgatatggtatttgagcggcttcttggagaagagaaaaaagaagagcagtaaaaagaaaatgtattggggatgaaaagagccttgcaggctatgtatgctgcagggctctttttaaatgggcaaaaagataggcaaaaagtttttggtaaaaggtttacaaaaagttatgtgagtgttattctaatagtacgttatttatagaaaataataacgggaggttacataaaaatatgaaattaattaaaacagtagacgcagagggagcggtcctctgccatgatattacccagatcatcaaaggtgtgaccaaggatgcagtttttagaaaaggccacattgttacaaaagaagatatcccggtacttttaagcgtaggaaaggaccagctttatgtatgggaaaaggaagagggcatgcttcatgaaaatgacgctgcagaagtcctttgtgccatgtgcaaaggggaacacatggagcgttcccaggcaaaagaaggaaagatcgagctttctgcagcctgcgatggtttattaaagatcaataacaatggcttaaaggcagtcaatggcttcggtcagatgatgatcgctacccgccacggaaattttgccgttaaaaaaggtgataaattagcgggaacccgtattatcccacttgtcattgaagaagaaaagatgacaaaggcaaaagaagcagctatggcggcaacaggaaacaagcccatcttaaacctgcttccatttaaacataaaaaagtaggtatcgttaccactggaaacgaagttttctatggaaggatcaaagatacctttacacctgttattgaagggaaaatggcagaatttgatacagagatcatcgaccatgtgacctggaacgatgatgatacaaaggtaacagcatctatccttgatatgatcaaaaaaggcgcggatatcgtagtctgtaccggcggcatgagtgtggacccggatgataagacccctcttgccatcaaaaataccggggctgatattgtatcttacggcgcaccggtacttccgggagctatgttcatgttagcttattatcaggtaacagagggagaaaatccaagaactgtagctattatgggacttcctggctgcgttatgtatgcaaagaggactatttttgatctggtccttccaagagttatggcagacgatcaggtaacagcagaagaactggctgctttgggccagggcggcttatgtctgaactgtccagtctgtaccttccctaactgtggttttggaaagggagtgtaatagaaatggaatttacacattttgatgaaaatggcaatgcccttatggtggacgtaagtgaaaaagcagagacaaagcgggaagctactgccagaggaagcatttatatgagccctgagtgcttaaagaaagtaaaagaagggactatggcaaagggagatgtattaggagttgccagagtagccggtatcatgggtgctaagaagacatctgaactgatcccgctgtgccatttgttaaatcttaccaagctgacggtggattttaccataaaagaagaaacaaacgagatcgaagcagcctgtaccgcccgtactaccggaaagacaggtgtggaaatggaagcactgaccggtgtaaatattgcccttcttaccatttacgatatgtgtaaggcagtggacaaatccatggaaatgggaaatatttacctggaacataaatccggcggaaaaagcggcgagtttgttaatcccagaaagcagggcatctgatgaaagacagaatgggaagagagatcgactacatgcggttttccattacagaccggtgtaacctgcggtgtaaatactgcatgccggagggcattgactgcatgccacgctgggatgtgttatctctggaagaatttgaagccattgccattgcagcagcatctttagggatcaaaaagatcaaagttaccggtggagagccactggcaagaaaaagctgtccccagttagtaaagatgcttaaaaatatcccaggcattgaaaaagtcaccctgactaccaacggagtccagttagatcagtatctggatcagctgctggatgcaggactggatgctattaatgtaagcctggataccgtagacccggtactttatgagaagataaccggccgggataagttagccgatgttatgaggttcattgaaaaagcagaaagcttaccaatccctgttaagatcaatgcagtttccattgatttcaggcagttacaggagaatggaaaagctacagaactttcccctcaggaaaactggcagcagatggcagaacttgcaaagcattatccggtggatgtgcgttttatagaaatgatgcccatcggctatggaaagcagtttaagaccattgatcacaactggctgcttgaaaatatgaaaaaggtctatccggatctggaagaagacacaagagttcatggatttggacctgcggtttattataaagttcccggatttaaaggaagcattggtctgatcagtgctattcacggaaaattctgttctacctgtaaccgcatccgtctgacatcccagggacatgtaaaatcctgtctctgctatgatgagggaacagatcttagaagtattttaagagaagggcaggaaagaccggataaggatacccattatatctggccagaaggcagagatgtaagggatgaaaagctgcaggaaaagctgcgggaagcacttgcaaaggcgatctacgaaaagccagcggcacattgctttgaaaagccaggtgagatcaccgaggcacataacatgatttcaattggaggataagataaaatggaaataactggaaaaagaggaccggaaggtgttgtaaaagcggtctgtaccagtgaaaaaaaaggtgttgaaaaacattctgttccggaaggacatttcttgaaagattttggtatcgagggagatgcacacgctggtaaatggcatcgtcaggtaagtcttttgtcttatgataaagtaaaagaatttaatgagcgtggcgctcaggtagaagatggtgcttttggagaaaatctggtggtagaagggattgatttccgttctctgccagtaggaatgatgatctatatcggggatgtggttttacgcatgacccagatcggcaaagaatgtcacagccattgcgcgatttataaaagaatgggcgaatgcatcatgccaagagagggcgtgtttgcagaggtcttacaggaaggaaccattcatccgggagatactgttattacctgttatccagatgagaaccggccttttcaggcagctgttatcactttaagtgataaaggtgccaaaggagaaagagtagacgaaagcggtcctgcagcaaaggaaatgctggagcaggcgggatacgaagtagtagagatgctgatccttccggatgaaccggctatgttaaagacacagttaatgcgtctggcagacggcagacagttagatctggtgcttacaagcggcggaaccggtttttccatgagagaccagactccggaagcaaccatggcagtggcagaccggaatgctcctggaattgcagaagccattcgttataaatccatggcagtgacagacagagccatgttaagcagaggtgtcagtgtgatccgaaagaaaacactgatcgtaaacctgccgggaagcccaaaagcagtaaaagaaagcttgggatttattttagacagtttggatcacggcttaaagatccttcgcggcagtgcttctgagtgtgccagaagagattaagaaaaggaaaacggaaagttttaaaaatcgcatatagacagtatctttgtaccgcctgcagcgggaggaagaataccgtgcaggcggtgttctccttatgatcgctatagtcaaacgagtataacgatactgctataaataaatcaatttttatttaaaggagaaatgagattatgaagaaacagatttgccttgtaatggcagctatgatggcagcaggaatgttagctggatgctccggcagcgcaaaggaaaccacagcagcagctactgaagcagcaacaaccgcagaagaaacaaaagcagaggagacaactgcagaagaaactacagcagcttccggcgaagagactgagatcttagttgcagcagcagcaagcttaaagaacgcttacgaagataagctgatcccaatgttcgaagaagcaaacccaggcgtaactgtaaagggaacctatgacagctcaggcaaactgcagacacagatcgaggaaggtctggaagcagacgtattcatgtccgcagctaagaagcagatgacagctctggatgaggaaggcatgatcgcttccgataccattactgatctgttagagaacaagatcgttctgatcgttccaactggaaatgagaagaagctggagaagtttgaggacatcgaaaatgcagacagcattgcattaggcgatcctgcaagtgttccagctggacagtatgcacaggaggctttaactaacctgggtatctgggataagatccaggataaggtaagtttcggaaccaacgtaactgaggtattaaaccaggtagcagcagcaagtgctgacgctggtatcgtatacgctactgatgcagcaagcatggctgatcaggtagaagttgttgcagaagctccagaaggaagccttgcaaagaaggttatctatcctgtagctgttgttaagggtactgctcatgaggaagttgcaaaggaatttgttgctttcttacagactgataaggcaataacagtatttgaagagtatggattttccagtgcgcagtagtcagtaactataaaaccgggatgttgtaaagtaagttacagtatcccggttttaatcaatttcccatataaatctcataagaaaagaggttctaaatggactggtccccaattttgatttccatgaagacagccagtctgtctattttcatcacattttttatcgggctgtttgcagcctgggcagtggtaagcctgaaaaatgaaacattaaaggttatctgtgatggtatcctgacactgcctttagtcctgccgcctacagtagcaggcttctttctgttatatcttttcggtgtaaaacgtcctattggacagttttttattgaatatttcagtgtaaagatcgccttttcctggattgcgactgttttagcagccgttaccatgtcatttccgttaatgtaccgttctgccagaggtgcttttgagcaggttgaccagaacctggttgcagcggccagaacactgggaatgagcgaatgggctgtattctggaaggtgctgtttgcaaatgcaacaccgggtatcttaagcggcggcgttcttgctttcgccagaggtttaggtgagtttggcgccactgccatgatcgcaggaaacattgcgggaaagacaagaacacttcctatggcggtctattcagaagtagctgcaggaaatatggacgcagcgtattcttatgtagctatcattgttgtcattgcatttatttccgttgttcttatgaactggggcgcattgatccgctcacggaagttttaatgttctctcggaggtaaaaagaatggctattcaaacagaacattctctccagcttggagttgaaataaagaaaaaattaaaagaatttgacctggacatctcattcagcgcaggaaaagggtgtctgggtattttaggtccttccggctgtggaaagagtatgactcttaaatccattgcaggtatcgttaccccggacagcggccgtattgccttacaatatgcaaaaggggaagctgccgggggaagagttctctatgactcggctttaaagatcaatgaaaaaccacagatgcgccgtgtaggctatctgttccagaattatgcccttttcccaaacatgtctgttgaggaaaatattgcagccggtcttaaaggaatggaaaagaaaaaggcaaaagtaggagaaatgatcgaacgtttccgcctgaccggtcttgaaaaacgttatccgggacagctttccggcggtcagcagcagagagttgcgttagcccgtattttagcttatgagccggaagcactgcttttagatgagcctttttctgctatggatacatacttaagagagggtctgcgtctggaactttctaaagtattagctgactatgacggtgtttctgttatggtaacccatgacagagacgaggccttccagctttgcaaaaatattatgctgttagacaagggacatgtgctgatcgccggaaattccagaaagatcttccaggatcctgttacctgtaaggcagcaagactgaccggatgtaagaatatttcaaagatcgaacggatcggcgaataccgtgtccgcgctcttgactgggacaatctggaatttgttacagaccggaccgttggagatgatataactgccatcggtatccgtgcccatgattttgagcctttggcaggagaagaggtaaaggccaaaaaagaggctggagaggaaaatcttatccctgttgtagatccaagtatttccgaaatgccatttgagtggtatattactcttagcaatggtctttggtggaaaaaggaaaagaccatccatactcatgatgcagcgggagtagtaccggaatatctccgggcagatccgtcagcgatcctgcttttaaagggagaactgtagaacagacataagaaaggaaatgggaaacatggagttagaaactggaaaaaaacttcgcacaggagcagttattgtggcagcaggacataaaagtaaaaattctgtttttaaacccttgcttccggtgggcgacagtacggcgatccgccgcatcatcattaccttaaagcgggcgggagtttcccctatcgtagtagtaacaggggataaggcagatgagctggaaaaacatatttccaatctccaggtgatctgccttaggaatgagcagtatgctgtgacccagatgttttccagtatctgtatggggcttaactatatagaagatctttgcgaccgcgtgtttgtgctcccggcgaagttcccggttttcttacgggaaactgtgcaacgtctgatgcagtcagatgcagatgtggtccgtcccatgtttgacggccacagaggtcatcctgttcttatttcttcttctgtacttccctctattgtatcttatcagggaagtgatggtttaagaggagcccttcgtcaggcagcagaaacctttcaagaagaaaatattcccgttgaggacaaggggatcattcaggctatagaaacagagggagacagcagcgttgattttatccggaaacagcagatccaggtccatccaaggatccagcttggcttagaacgggatgatatattttttaatgcccagacagcccatttcttacagcttacttcccatacaggttccatgcagacagcctgtaagcagatgcatatgtcatacacaaaaggctggaagatcttaagagaagcagaaaaacagttaggcttcccgcttttgttttcacggtccggaggcagtgacggggggtcttccaaactgacccctaagggagaagaatttttaaaacggtatgtaaaaatggaagaagacctgaaaaaagagggagaacggttgtttgaactttatttcgggagagaagtataaaaacagagtaaactaaaaacaggatgattgcaggtatgagcttgcaatggtactgttttcggtaagtaccttccaggcaaggaacataccggtagttgtaaaaagaagggaatggaactgatcatccaggatcagctggttcatctgttctaagcattcagaagcattctgccatgaaaaatgggggatcacagacatttccagactttgtctgagaaagtgttcctgggatacacgggctatggagatgggggaaaccagggtttcacgtttggggtacctttgaagaggatgttccttcccaggaagttgcagaagaaaccagaaaagaagattaaactaaaaatgtttgcataattgcaaaaaaatgttatacttaagtaagtaacacaaaaagcagtttggagctttatgcaagcagtatgcaggaactgtccggtgatccgggagaaaaactgtgaaaagccggtacggccattgctccgggatgaagatccctgaaatggcccgccggtttttttgccatagcgttgtatttaattaagaataacggaggaaactatatgggggaaagcaggcttcactacggaatgtcgctgaggctgtattttgaggaaaaagcttttggaccgggaatggtcatgctccttcgggaggtggagcgtaccggttcgctgcaaaaagcagcaaaggctatgaatatggcttacagcaaagcctggaagatgttaaaaggggcagaaaaagaatggggatttgcccttacagaccgtgagaccggaggaaaagacggcggcggttctacactgacaccacaggcagaacggctgatcgaggcatacgaaggctttaaaaaggatgcagtagatcatctggatcagctgtttgcacagtatttttcagaggaaaaggtagaaaagataaaaggaatggagtgatattatggagccacaggagatcgtattctgtaaaggaggcggctgtactgccaagctgggaccgggaatactggcaagagtgttaaataacctgccaaagacctatgatcccaacctgcttatcggctttgacggttctgatgatgcagcggtgtacaagcttaccgatgacctggctattgtacagacactggatttcttcccgcctatggtggaagatccctatattttcggtcagatcgcagcagcaaatgccttaagtgacatttacgctatgggcggtgatgtaaaaacagctttaaatattgtatgtttcccggaagcaatggatttaaacatcctgggaaagatcatgttaggaggcagtgaaaaggtaagagaagcaggcggcgtccttgcagggggacattccattgcagacagcgatgtaaaatatggcctgtctgtaacaggggtgatccatccggataaagtgtttgccaacagcggctgtaaagtgggagatgcgctgatccttacaaagccacttggcgtcgggatcgtatgtacggcatcacgtatgaaagcagcttccaaagaggcctatgacctggcagtgaaatccatgactacattaaataagtatgcgtctgagatcctgcgtaaataccgtttacacggctgtaccgatgtgacaggctttggatttttaggccatctttgtgaaatggtcacagaccaggctacagcaaggatctataaggaaaaagtgccttatatcccggaatgtgaggattatgtagaagaattttacctgacagctgctgcccagagaaacagaaaccatgtgcaggataaggtggagttcagaaactgctcctttgcaacagaagagattttatatgatccgcagacgtccggcggactgctggcatctgtagataaagaagatgttccggctattatggaagaactggaaaaactgggacttccctgcggcgtagtaggagagatcctgccgaaacaggagaaggcggttatcatccagtagatgaacatggccgcccacgggcggcttgacaagatacatgccaataaaccgccaacggaggttttggatatcagatttatggaaagagaggaagaaaaccatgagattagatgaaagaggaaaacagtgcccattaccagttattgaagcaaagaaagcattagaggcatctgcaccaggagaaaaggtagaagttgttgtagataacgagatcgcagtccagaacttaagtaaaatggcagatcacaaaggtcttgctgtatgctctgaaaagacaggtgagcgtgaattcttagttaccattactgcaggagaaggaaatggtgaagctgctgaagcaccagttgcagcagaagaagtgacctgcacaccagatggaagaagaaaaggcatggtagttgtcctttcctccaaccagatgggacagggggatgaggcattaggaaagcttctgatgaagggctttgtatttgcactgacccagcaggatatgctgccggagaccattcttttatacaatagcggtgccttcttatcctgtgaaggttctgacaacctggaagaccttaagaccttagaggcacagggtgtggagatccttacctgtggaacctgcttaaaccactacggactggctgaaaagcgtcaggtaggcggtgttaccaatatgtatgagatcgtggagaaaatgaccaaagccagcgtagtggtacgtccataaggcattttgtgccaaggcacattcttttttacttagaaagtataattttttaggagaaggtaaatatatgatacagagaaatgaacagcttgtgatcgtaagaggagggggagatattgctaccggtaccatcagccggcttttccgcagcggatatccggtagtgatcctggagatatccacaccgtctgcgatccgccgtcaggtggcgctttcagaagctgtttatgacggggagagcaaggttgaggatgtgacctgtataaaggtagagtcctgggaagaagcaaaagaggtattaaaagagaaaaagaaagtacctcttttagtagatccggagtgcaatatcttaaaacaggtacgtccatgggccttagtagatgcgattttggcaaagaaaaatctggggacaaaccgccagatggcagataagaccattgctttgggacctggttttagtgcaggtgtagatgtagatcttgtagttgaaacacagagaggccataacctgggccgtattatcgaaaagggaccggctacgcccaatacaggtactcccggtatcatcggcggatacggaaaagaacgggtcatccattcaccggcagaaggaaagctttacggcagagtaaagatcggtgataaggtagaaaaaggacagaccattgctgtaatctgcacagaaaacggggaagaggtcaaggtagaggcaactcttaccggtctggtccgcggtctgatccgtgatgcttatccggtaacagttggctttaagatcgcagatatcgacccgagagaaagtgaatataaaaactgctttaccatttctgataaggcaagaaatatcggaggctctgttttagagggcctgatgtacttagaggaaaagcagggatattaaggaggggagcatatgatctatctggacagcgcggctacttctttttaccgtccgccctgtgtggcagaagcggtggcagaggccatttccagtatgggaaactgctccagaggagcttataaagaagcacttacaggagccagagtcatttttgagacccgggtccttttatcagaaatgttccatggagatggtccggagcaggtggcatttacagccaattctaccgaaagcttaaatattgccattaaggggctgatcagaccgggagaccgggtagtgacaacggttttagaacacaacagtgtgctgcgtcctttatatgaaatggaaaaacagggagcagaactggtcattgttggctgtgaacatgcaccggaaagtgccggtgaaactgaaaaagaacgggtaagacgccttggaaaactggactacaaagcccttaaggcagcgatcacaccgggaaccagggcagtagtcatgacccatgcatctaatcttacaggaaatcgtacagatctaaaaaaagtaggagagtggtgcagacaggccggagccctttttatcgtagatgcatcccagacagcaggtcattttcctattaacatagaagaaaaccacattgatgtgctgtgttttaccggtcacaaaggccttatgggaccccagggaacaggcggactgtgtgtgcgcaaaggtcttgctgtaaaacctttattatcaggaggaagtggtatccttacctttgaaaaacagcatccttcagtgatgcctacagcgttagaagcaggtactttaaacgggcatggcattgccggactgagagctgcccttctttacataaaagaagaagggatcgaggccataggcgcccgggaacagaagctgatgcagcttttctatgaacaggtaaaggagatcccggatatccgcatttacggggatttttcacagaaagacagagctgctattgtgtctttaaacctgggagaagaagagtccggggaagtcagcgactatctgtcaacagaatatgggatcgatacccgttccggcggtcactgtgcgcctttaatgcatggggctttaggcactgtggatcagggggctgtgcgtttcagtttttctcattttaatacagaagagcaggtggaatgtgcagtacgggcattgaaagagtactaaaaaggaataaaacccaaaagaaaatatctcaaaatacaaaaaaaaggactgtggaccagggaatttctggttacagtcctgtttttatttttttagttcatgcctgtctctatgccggaacatgctgcattaagatctcagtaagagcagtaccgctgctggtatgacagcgcacgatctcggtctcctgctcattgacctcgtctaaagcgcagcggatcatcttgtgggaaacggtattggtgaacagaactaaaagatccggtcttccgatctgcttgtccaggctggcactcatctgagtgaatacctttgccttgcagttatagtttttacagatttttttatactggctgaccatacggtcatgtccgccgatgataacaacgctcatgaatgtagcctcctttggtgtgtgcaatatagtgtgttgtgtgcccctgaaaagtgtatttagaacatgttcttgtattatatgtatgggggaatggtaagttatatgtttcgtatcagaatggttagtgctaactaactcttggtaaaatcatacatgatttataggaaaatgtccataggattaaatgataagttttctcaataacatgttaataatttggcgggcttgttaattctaaaactttttgcataatatacaaaaatatttagatattctcaaaaaccttattatttttgcagattgtacctaaaaaatttttaggttatactgtttacagagttaagaaagcaatccaacaggttgaaataaaccggttaagcaataaaaactacgaattaaaaactacgactcaggaaaggaagataagaacatggcagcaatcgcagtaacatttgtatttggaattttagcttacgatatgtataaagtaatctgtgagaaataataacagataaaaattgaaaaccagcaaagacctgaaacagtctggatcaacagacgctgtttcaggtctttttgtatttgttttatatttgtacacagctgttttctttacggtattaagaatttatggtaaaattactccaaagacaaattttgggggaatttatttgaagatttctgtaaaaacacagggaaaatggacacagacggatacgttgtggtccgcgctttttatagacgatcggttaaaaaaagatccgggtcaggcagaccattcccctgttctttcttttgtgggaggcgggggaaaaacctcttatatacgccgtctggcctgggaaggcagagaaaaaggataccgtgtgctggtaatgactacgacccatatggcagttccggaatattttggagtattggaaccggatctgggacaagtagaaaaaatgctggaaaaagaagggatagcagttgcaggatgtcctgccaaagagggaaagatcgctttccgggactgggagttttatgaaaaagcaggaaaactggcagatgtgatcttagtggaggcagatggttccaaacggcttccggtgaaagtgcctggaccaaaagaaccggtgatccctgaaaattccgatcagatcctttgtatctatggtcttggagctttgggaaaacaggcagccgactgctgtttcaggatgcagccgtcagaacagcttttaaaaataccagaggatcaaaaagatggaaaatggatcatgacagaggagaaaatgtctcttttaatgaaaaaggggtatttagagccattgagacaacaatttccttacagtcaggtgatcccggtctttaaccaggcagataccatgaaactggaagaaaatggaaaaaacattctggaaagaatggaggaagaacggggaatattaacaggagaactgtggaaggaaacgtcatttaacctgttttagggggatgtactgtataaaaagataaaagaggtaagtacaatgaaggtatcaatgatctatatggcttccggatttggaaagcgttatgggaccaacaaactgatcacagaattcagaggcgagccgttgtatcttcacgggcttttaagcttgcaaaaggcagcgaaattgttagaaaaaacggaaaagatcaactgtcagctgatcctcatcagccagtatgaacgggtactgtccggatctgtggagcaggttccggaagcagagcgcttttttaatgaggacagcgaccagggaattacagcttctattaaacttggcacagaggttgcctgggataatgcagatgcatatctgtattttgtggcagaccagccctgtatggcaggagagaccatagccaggtttgtcagtgagtttatgaaaagcaaaaaagggatcggctgtgtgtgtgcaaagggacacagaggcagccctaatatattccgtagacgctacaaaaaagagcttcttgctttggaaggagatcagggcggacgccagatcatgcagaaatatccacaggaaatatggatgatggaagtggatgaaagagaattaaaagatattgaccagccggcagatctgactgcattgcgcctagaactggaaaatacgtgatctttcagatattaaagacatcagaattgttttaaaagcacaagggaagaaaaatgaaacagaaagaaaatgtaaaagaggaagtaaaagaagaggccggggaaaaacaacagaagaataacttcgcccagggaagcattgttgtaaacatattaaaactggcagtgcctatgacattggcacagctgatcaatgtgctctacaacattgtagaccggctttatatcggccagttaaaagatgaggcgaccatatctttgacaggtcttggactgtgtctgcccatcatatccattgtgatcgcctttgcaaacctgtttggaatgggcggtgccccattgtgttccattgaaagaggacggggaaacaatgaagaggcagaagccattatgggaaattcctttgctatgatggttgttgtaggagttatcctgactgtggtgggacttgtatttaaacggcctatgttgtatttatttggcgccagtgacgcaaccatcggatatgcggactcctacatcaccatttatctgatgggaaatatctttgttatgaccggccttggaatgaacagctttatcaattcccagggttttggcaccattggaatgatgactgtattattgggagcagttgcaaatattatcctggatcctgtttttatctttttctttcacatgggtgtgcgtggggcagcgctggcaacgatcttatcccagctgatctccgccatctggatcttaaaattccttacaggtccaaaggctattttaaagctgaaaaagaactgtatgaaactgaaaagatccagggtcctgcgtatcattggccttggaatgagcggctttaccatgtccattaccaacagttctgtccaggtcatgtataatgccatgctccagaaaacaggcggtgatttatatgtaggtattatgacggtcattaatacagtccgtgaagtcatttccatgccggtccagggtattacccacagctcccagcctgtgatgggatataattacggtgcaaaagaatacggccgtgtgaaaaaagcaattgtgtttgtatctgctgtttctgttttgtatacattaggagtgtggtctctggtccatgcatttccggagtttttcatccgtatcttcaaccgtaccggggatctggtggaagcgggaattccggctatgcgtatttatttcttcggctttttcatgatggcgtttcagtttgcaggacaggccatctttgttggtcttggaaaagcgaaaaatgcggtattcttctctattttccgtaaagtgatcattgtaataccgctgatcattattttacccagcatgtttcatatgggaacggacggcattcttatggcagaaccggtgtccaactttatcggcggaacggcatgctttgtgaccatgctctgcaccgtatggccggaacttacaaaaggggaaagggataaaaacaaatgaagataaatttgcgaagggttacaacaggcgctgttcttatagcagcagcgtctgcttttttgttctgtaccggatttacgaaagcatctgatcatgggaaccatgaaaatggttatttaaagtctgcaacctattactcggatgactgggtgatcaatttctggaacagtgaaagcagccatatggatgaggagttaaaacagatccgggaagatgggtttaacagcattattcttgtagtaccgtggagggaatttcagccatctatggcgccggaacactataatgactacgcatgggagaagtttgaccgggtaatgaaggcggcaaaagcccaggatctgaaggtcatgttaagagtgggatatacctgggactattacagcagtgaaaatgtactggcccgttatgaaaagctgctttatgacagtgaaacaaagaaagcatggcttcactatgcaaaacggttgtatgaaaaggcgtctgcttatgacaatttcagcggcggttttattacctgggaagatttctggaattttgcggaaaatggcagtaccctttatggaagcgggatcacaggacggaaaatggcagcacagtgcggctatacccagtatgtaaaagaacattatacattagaagaattaggagagatctacagggatacctttgactcttatggggaaatctatctgccggcaaaagagtcttatgcaagaaaattgtttttccagttttatgaccattttttaaatgatatccttgcagagacccagactgtatttccggacctttccatggaagtgcgtctggatgtggatccggtaaggcggctggacgggacattagaaggtgctcctcatgatgctactttttcctgtggctcatccggctttgccagtgccatgttcagcgttcccatgggatttgaaaataatggggaaaaagtaacagcagcccaggctctttccaatgcagcttcttattttgaccggttattccagagcagccagcagaaaaagatctacattgaccagttcttatttacagataatacacctggttttgaacataatgcccagcttttggaaacggagaaagcggcttatctggatggaatggcagagctgtttaaagcaaagacacttggatacgggatctggacctacagggattacggggataataaagtgtataattcccagtttgcccttgcacagcagggctggaaattttccggcaggagcaaagtagaagagcacaatggaagcaggatggcagtacttccggtttccggatggatcagccaggatatccacaaccgctctgcaggaatggaagaaaataacctgtatgtaagttttctgctagaaggagaaggaaactgccgggtcatggtgcaggcaggaggacagaagcagactgtatctgcaggcagtccgcagaccgtgacccttaactttggtactgcatctgcaggagaactggtcatttcagcccagggaacaggaacagtatacatagatgatgtaaaagtgtatactggcattacgcagggggacatgtaccatatggatggaacggaaagctcctgtatccaggcagtacgtgccatgaacgcaaaagtccgttaaaaaagcgcgcttagaataaaaaaagagtttcggaacataatagtctggtaacctttaaacctaagaaatgtttgaatgaaagatcaggagggaccagattatgacgaaactggaatgtagcgcaaaaaactgtgtacactatgcggaagggtgctgctgtaagagttctattacagtagacggggctcatgcacgctgtgcagatgatacctgctgcgcaagtttttccgaaaacacaggcggagtctttaaaaatctttttaaaacgcctgagtccaaactggatgtggtttgtgatgcggacagctgcagatataatgaagatcactgctgctgtgcaggaaaaatcgatatccgtggagaagacgcctgtgactgcggagagacctgctgcggtacttttgagcagggataacggagaaaaaaataaataaaaaacctattgacaaagaaaacaaaatagagtatagtaataaaagttgtgagaacgactgacaggaaagcaggtatatccgcctcaccctggcacgagcaagtgacccgggttcatatttcagacactgactgaaaactgaatgttttggtttgatttttatctggtatcgtattgagagacagataaaggtttcagtgaaagattatgtatttttgcggatggcactagctatccgctttatttttgctcttcattcaaaaacatgactatggaggtgtacaactattagcgaattaatgattaacgaacagatcagagacagagaagtaagattgatcggtgaaaatggtgaacagttaggaattatgtctgcaagagacgctttcaagctggcacaggaagcagaactggatctggtaaagatcgcaccaactgctaaaccaccggtatgtaagatcatcgattacggaaaataccgttacgagctggctcgtaaggaaaaagaagcccgcaagaaacagaaagtaattgatgtaaaagaagttcgtttgtccccgaatattgatactaacgacctgaacacaaaagtaggagctgccagaaagttcctggaaaagggagacaaagtaaaagttactcttcgtttccgcggtcgtgaaatggcacatatgtccaagtcaaaatacattctggacgatttcgctgagagtctggctgatatcgcagtagtagataagccctcaaaggtggaaggaagaagcatggttatgtttttaactgcaaaacgttaaaatagaaagttttaaggaggaaatttacaatgccaaagttaaaaaccagcagagctgcagcaaagcgctttaaaaagacaggaaccggtaagttagtccgcaataaagcttacaagtctcacatcttaactaagaagtctactaagagaaagagaaatcttagaaaagatatcgttaccgatgctactaacgtaaaggcaatgaagaagattttaccatatctgtaagttttagattgtagaaggaggaattaccgatggcaagaattaaaggcggtttaaacgcaaagaagaagcacaatagaatcctgaagatggctaagggctacagaggcgctcgttctaagcagtacagagttgctaagcagtccgttatgcgcgcactgaccagctcctacgcaggcagaaaagagagaaagagacagttcagacagctgtggatcgctcgtatcaacgcagcagctcgtatcaatggtctgtcctacagcaagttcatgtacggcttaaagctggctgaggttgatttaaaccgtaaggttctgtccgatatggctatcaacgatgcagaaggttttgctaagttagcagaactggcaaagagcaaacttgcttaatctgtcagaattattataaatagtaagcaccgggaatgactgaaaagttgtttccggtgtttttttgttgccatgcattttatgcatctgaaggaagctgccggtagcaggttcaaagtgaagaaataccgcctgcatccaacggaactggcagcagacggtatttgaagatttttgggataaatacaatgttttgaagcggatctgatgtgatcagatcaggccacagcgttcgccttggggaatatccctctgtatacatgcaggaagtaaatgatctctgcaatggctgtaatggtccaggagaaaacataaagcagatacaaagacgggatcgtcttaaagtatgcaaatacagtgtagacccatacaacacggaatacacaggaacccatgatcacgatgaacatgggaaccagactctttccaagggctctggaagcggcaatggtgcagtccataaaagcagaaacaccataggaaaagcccatgatggtaaggcgcttaagaccggcagtaatgacttcaggatcagctgtaaacagagataagaactgttttccgaagataactaagagcagtcccatagcacctccgatgccgaaagaatacagcaggctgatcagatagctctttaatacccggtcacgttttccagcgcccaggttctggctcataaagctggcgcatgcggtatagatagctgccattacgtcatagatcaggccgtcggagtttgcagccgcagaatttcctgcaaccatagtggcgctgaaggaattgacacctacctgtacaaacaggtttgcaagggcgaaaatagcattctgcagaccggaaggaataccgatctttaagatgtcgatggtctttgacgggtccggacggagctttgataaatgcagtctgtaatctgtattgatacagaacagatcacgtaagatcagtccggcagatacatactgggatatggcactggcagttgcaacaccggctacatccatcttgcagatgacaacgaagaacaggttcatgatcacgtttaaaacgcctgcaaggagcagatagcgtaccggccttgctgtatcaccgtctgcgctgaaaatagcattaccgcagttataaacagccagggcaggcattccaaggaagtaaatgcgaagatacagcacagagccgtcgatcagctcttcctttgtatgtaagatctcaaggacaggtcttgcaaagcagataccgaataataacagggccagaccgctgcagatactgacgataagagcagagtggaccgtatgggaaagagcctgctttttcccggcgccaagatagagggcggtaagtacattgataccacccgccagaccaatgagaaagcctgtaaacatcgttaccaggatcgcagtggaaccaacggaccccaaagctaacggccccgcaaaacgccctacaacggcgatatccgacatattaaaaagaacctggaggacattggaaagcatcagcggtatgctgaaaacaaaaatgttcttccaaagggatccctgagtcagatctttagatggctgtttcataaaaacttctccattcgtaaaaaataattttatatatgaaattttgtaaagataaaaaaagacccataacacagagttttctgtgttatcagcactagcttcagtatagcataaggggatattgtgtacaagagatggaaaaataaaagtttcttttgtttatgagtatttatgatattaaagagatcctttctatgatatcgaacatatcatagaaggatctcttttagtggttatgttttaaacatgtatttcctgttttgtaattatttatcaaggcctttccatacaatgttcttgtaacgatcaggatcggtatcgccctctgtagagaagagcagtactttggaattttcatccaggccaatgtcatttcttaaatctttgtattcgtccatggtcatcatagctgctaatgcaccgaatggagcagcaccagactcaccggcagcagcacccttgtaaagacatgcagcagcttcagcctcaacaactacgaatgtaggtaagttgtcagcatacagattggagaagtaaccaacaactgcaccggctaaggaaccaacaccggcctgtacgaagatgtgggtaggacgctcacatccctgagcttttaactgttcaccagcttccattgccatggtgccgtatccctgcatgatccatgccgggatctcttcgtagccgtcccaggcagtatcctgtacgataacgcctcttggagtttcatccgcttccttagcagccagacgaacacagtcatcatagtttaattcctggatgtctacctgagcgccttcttttgcgatattctgaagacggggctgagtagttcccttaggcatatgaacaactgccttctgtccaagacggttagcagcccatgcaacaccacggccgtggttgccgtctgttgctgtaaagaaagtagcctgtccgaattcttttcttaactgttcggaagtaagtacggaatagggaagttcagaaacatcctttccggtttttttgcgatgtaacgagccattgcaaaagatccgcccagtaccttaaatgcgttcagaccaaaacggtaagactcatcctttacatatacttccttaactcctaaataggaagccatgtgaggcagcttggttaatggtgtttcgctgtactgaggaaagctctcgtggaaagtacgcgcctttttgatctcctcaagtcccataattggaaggtttttgtcatctgttttaggcatcttgtttactgcccacagaatcttctgatccattttatattgtatcaatttaatttctttccggctagtccaaaataggattgattgcaaaagaagagtgaaaatgtctccaaaaaacatctgaaaaataaatttgaaaaaaattaaaaaaatttcaaaaaaactattgccaaactgaaaaacctatggtatattataacacgtgctgcgggagtgctggaattggcagacaggcaagactaaggatcttgtggttgcatgatcgtgtgggttcaagtcccatctcccgcactggtactaaaaagtaccgtgcttaactaaataagcaaatgcagaagtggcggaattggcagacgcgcacggttcaggtccgtgtggtagtaataccttgagggttcgactcccttcttctgcaggatttaaacaggaacttggaaacaggttcctgtttttcttttgcaaaaatgatgagtgcaatcttgtgttggctttcggcacggggattggaaagaggaatgaaaaatggatttttacaaacgtctggggatcgtatgccgggcagtgccggagggaaaagtcattacctatggtcaggcagctcttttgtgcggttatccaaagaatgccagacaggtgggttatgggttaaaaaaagagctggcaggagatgtgccagcttataaggtagtaaacagccagggagttctttccggtgccgcttcttttgagcatccgggtcttcagcggatactcctggaagaagaagggatagaagtctctatggacaacaaagtagatctaaagaaatatggatggaaaaattccctggaagatgcagaatttttccgggaaacatttcgcaggaaggggatctagttatttaaaattcttcttcctcctgggccggtatacgtaccgtcacctctgtgccctgtccgggaacactggtgaaagacaggccgtatccgctgccgtacaggcttttaagacgcaggttggtattggatacgcctacatggcgggaagaggagcctacggctgcctgggtgcgttcatctaaaagagagtccagcttttccggaggaataccggccccatcatccgaaattacaaaaacaatatcattttcttcgcgccagcctgtaagaaggatggtgccttttttttcttctttcatcataatgccatgaaggagggcgttttccacgatcggctgaaaggtaagccgcgggatggaaaaatggtcaagctccggcggaacgtccgcaataaattccgcacagttgttgtagcgcatgttctgaagctgcatataaagggaaacatgggtcacttcgtcctggacggtgctgatcaggtctttgcttcctaaagtcaggcggtagaaacgggtaagagcctggacggcttccgttactttttcgctttgcccggactgggacagccagttgatcatatccagggtgttatagagaaaatggggattgatctgtgcctggagggcgcgaaattccgcgattcgcagttcggtggctgctttttcttcataatccatcaattgattgatctccgcagtcatataattataggttcctgaaagaacaccgatctcgtcatttcccgcagctgtcagttctaaaggctccggccgtccttttcgtatggtctccatctgcagggctacgccaataatacggtctgcaatagactcagacagtttataggcgataaaaagggcaaacagggcgatcataccataggtaaaggcaaagttaaggacaacggagtgaccgatccctgcaatctggtccctggggatcagggaaaccatgtaccagtctgtattttttaaagagaaacaggctgtataggcagaaaaatcctcgtagttcactaactgaaactgtccgctggcatccgggtctgactcaaaagcggtaattgcaaagttacctgaaaaaagagaaatgtcggaagcggctaccaggtccagatcatcattgatcagaaaagaaaattcccctttaagggaagagtcttttttcaggatctcttcaaaggcatcttcggaaaaatagatggctgcataggcagcgatctttgggacatcttcttcgttggaacggtaaaaaataggcttgatataggctaaaggaccattttcatctgcctctttttcagacagggcactttttggaaaaaagaactttgaccagccttctgcattaaagtattctagccagggactggaaacttcggaaagagggacaaacagtctttgggcattggtattaaactgctccaggcggtgataggtatggtcatcataataaaaccggacagactcaatgagagaatgatcggtaagtgtatctgttaaacgcatcaggttgctgatcttgcttctggatgggatcagcccctgggcctgggcattggaaatatcaaacatatcccggatcacataggaagaagtcagggtatcagaagcatgggtcacatgggaaacaaggttttcaacagaaagtacggactgggaactgagggcctgttcggagcggatggtatcatccataacgatccggaagatatttaagaaaagaaaacagatcagaacagccgtaggaataagaaaaaggatggtatgggataccaccagctttttctttaaacgcatgtcatagatataataatgaaggatacggttaaaaaaattcatcgaagcattttctccctgtattcagatggtgagagccctacgatcttgcggaaggccttgctgtaataatttccgtcgctgtagcctacttttgcggaaatgtctgtgatcttataaaggggatcacttaaaaactgtttggacatttttatgcggtaatctgtaagatactggtttaaggtctgaccggtctcatttttaaacagggtacacacataggtaggagacaggcgtacatgttcgctgatatccggaacagaaagagatggaaccgcataattctgatggagatattctttgatctggaatacaacagggttttcatctttattggaagccagacggctgaaatacagttttattttttcacagaagaactggtggagggtctttaaagcagcacagtccatgatcccttcccagatggactctgactccaggccttctctctgccacagggaaatgtggttggacatgctgatctcgtctaacttaaccagatatttaaaatacagatcacggacctggctggaagagatattctggctgctgcatacagactgatagaagcggtcagcggctgcaagtgcgtcttcttcattattattggtaagagctacggtcagatccatcataatatcaatcaggggatgacggttgttttcgctttctgcttccattaaaagggtatttggttcatggaaaaaactgcgttttaaaagctctcttgctgtttcaaaggaaaaagaagcccgcttaaatcccagaacaaccggtcccatggacaggaagaaagaggaaagttctttaaaatgctccataagattgtgggcacagtcaattaaaaccggtttttccggtttttcactgctgtagataaagcagatgataaaacggtctgttttaatgaaatcaagggcatggaagcctttttctgccagataagcccagaacctgcgccggatctctgtaagcaggtcagaggaaagttccgatattggcgtcagacattccaggatcagggcagtaaaatatgaattttcccctacaggaggctttaattgtgcgccgatcacaggagcctgttcttccgggtctgtttctgttaaaagctgtgccagctgggaacgcaggttgccttcatgcatccactgggcgttcagtgaggtgtacatggagcggtactggtggatgccctcggctaaggcttctgtcagctcattcatatcaagaggcttatccacatagctgacagcctttaatttaatagcagctttcagatattccttatctgagtaggcgctcataaacaggataatggcattgggaagggatttcaggatttcttctgccatctccacaccgctcatacggggcatgcgcacatccgttaagataagatccggtttttctttcagggcgatctcaaggccgtggacgccgtcatctgccataaaagtgtggtggatccccagtttttccaaaggaagacttttaagaataccttcacgggtcagtttttcgtcatcaacgatcaataatttcatagaatatattgctccccttaataaaatcaaaaaatattactgtatatgataggattttaccatggaattaaaaaaaaaggaatgttatcataaaaatgtccaaaagataacccgcacagccgggacctggcttattgtaagccacatccccaacgggtgccggttgtgattattttttatatacgatcaggaggaactgaaaatgcagaagatagagttaaagtttgaccagccagaagagatcattgattttgtacgtattatgaaccgttatgagtgcgatgcagatgtaaaatacggcagcatggtagtggatgcaaagtccatcgtaggtgtattatccctggcacgttccaaaactgtagaagtgattcttcatacagatgaatgtcagaacctcttagatgagatcgcacagtttgcagcataatacaaaaatattgttaatcttcccctggaaagcatcggtaaagtaccggtgcttttttatgtactaggaaattccgttggaactccctggtacacaaaaaggcacgacctgccaacgatgcgcactcgcgcgatgaggaagtttgtcgcaagcgaccgcgctcggcgcgagaatgtgccaaggcacattcttatttacatatggatttacaaaaataaatgaatgttctatactttataaaagggtagtacgcaaggaggaaggttaaagattatgacagaatttctgccgggtatttataaggttcttcagaaaacagatcgtggcaataccacggagatcaatatatttattattcctggaaaaaaaggggaaagaagcctgatgatcgatgccgggtttcaggatgaaaactgtctggcacagatggagggagtattaaaagagctggatatttcctatgaagatctggatgtatttttaacccataaacatcatgaccattcaggactggcaagtgtgtatgcagaccgtggtgctaccatttatatgaacccgttagaggaacgccaccattatgactgcctgttttacagcaccaagaaaacggatccccaagaacaggataaagtccttcatagtgtaggagttacagaagagggtacaccggaagtctgggatatgtttgaacgggtgagaaaagtagtggaaaatcacaatggctggacctatgaggtgcaggatttcccttataagcccatagcaccgggagttgtactgcattacggtgactacacatttgaaacaatagatctgaaaggacatacctttggacagctgggacttttcgacaaagagcataagatatttttctgtgcagaccaggtgatcgatgggatcgttcctattgttgcaacaacgtatccggatgaacatcttttaagggactattttgtttctttggagcgtttccaccacgaatttaaggagtgtctgctccttccggcacatggaaaagaaatttttgatgcaaaaaaagtcatagaccgtattgtattttcctatcttgacaaggtagagatcatgcataatatcctggaacattccagaaaagcaaggacgatccgggagatcgcaaccattgtctacggaatgcctcatcctccgaaagatacagcagaatttattaaattaaagatgatcatgagcaaatgtttctcctgcctggaatatttaagggatgaagattttgcagtccgtgaggaaaaagacgggaccttttactggcggccataatttctttcaaatacaatgtccgtgaaaaagtacttgcaattccataaaaaaagagtatagttacttaaaaatagctattaaaacaacataagaaagcagagtaggtttatgtgcgttaagtgccggctgaacagggagttgtcagtcagacgaaaggaattttgaaagaaaaggttcctgcggtacataagccgcatcccgctgcatcagagaaaatcttgattatctccgattgtagtatgaggtatctgcaaaggaggtaatttttttatggaaagattagcaactttgtttaccggttccttcagacagttaaaacaggtaaaaacggttacggtatgtgccatgcttggggctgttgccattgttctcggttcattaagcatcgagcttggaagtaccctgcgtatcggtttttccggtattcccaatgagatcgtccacatgctgttcggtcctgtagtgggaagcgtttttgcaggcactatggatattttaaaatatctgatcaagcctacgggagcattttttccaggctttacgctcattgccatgcttgcaggcctgatctacggcagcttttactataagaaggaattaaatttctggagagtgcttgcagcccatattacagtggctctgatctgcaatgtgctccttaatacctggtgtctgtccattctttacggaaaggcatttgcagtgctccttcctgcaagactggtaaagaatgcgatcatgtgtcctatcgatgcttttattttttatcatattgccaaagttttagatgtaacaggtgtatttaagatgatcagaaaagaataagatcttaactgaaaataacttttgcgaaaagacctgaggtttgaatacttccggtctttttttcatacattgaaataacgtacattggggcagtaaggagagccggctatggactttcatataagccagtttctttcaccggggagaaaagaatttgtaaaagggacgctgcttcttacaggggccgggcttttctgccgtgttttaggctttttttaccggatctacatgtcacgtaccataggggcagaaggtctgggactttacaatatgatccacccgctgttcagtattgcctttgcggtttgcgccggttccatccagacggctctgtcccagtacattgccgccaaccaggaaaaaggaccggctgtttttaaatgcggtctgttcctgtctctaagtctttctgtgatccctcttttgctgttgtggaaaggaaaaatgtttctggctgggaatatcctttcggaaccccaggcagcccgttatcttccggtactggcagtttccgtaccatttgcctgtctccatgcctgcatcaacggctattattatggaatgaacaaggcacatattccgtctttttcacagatcgcagagcaggtgatccgtatgggtgcagtgtggctgttggtggggtatctggaaaaaaatggaaaatcggttacagtaggtctggcagtagaaggccatctgatcggagaaatggcatcggcagcttttacatttctggcgctgtttctggtgccgccgcagaggaaagagagacaaaataaaacactgataggggaaacaggcaggcagaggcgggagcagaagcgtgttgagaaagaaaatgtccttggagataacgcggtatttgcaaatctgggtccgatcttaattttggcacttcctcttatgggcaaccgtctggtgttaaatcttctcggaagtgcggaagctatcctgatccccagccgcctgatcgattatggtctgaccaacaaagaagcattatccatatatggagtacttaccagcatggcgcttccctttatcctgtttccttcggctcttacgaactccatggcagtacttttacttccatcggctgccaaggcacaggcggaaaaagacgaaagccgcatttctaccatggtcacactgtctttccggtacagctgttacatgggtatcctgtgcatcggtctttttacccggtttggcaaaagccttggcacgatcattttccataatgagctgtccggctcttttattatggtactttgctggctctgtccgtttatgtatctggcaactactatgggaagcatccaaaatggccttggaaaaacgggtattaccttcctgcaaaatatgtttgccatggggatccgtctggtatttgtgctgtttgcagtgccgctgtttggtatccggggatatttatggggctttctggtcagcgaactgcttttagcctttttatgctgtttttctgtccgccgtcaggtggaatttcactgcaatatggcagactgcgttttaaagccggggctggtgcttttgatcagtctggggcttgaactggccttgtgtacagctattcctgtaacaggcagttttctggaaatagtattccatatgggtataataaccgtctgttatggggcatttttaggggtgatcctcagataaaggggagataaaccaactaactttgtatgaaattaaaacaatcgggtattcacattgagtttcatggaatactatgttatagtaaagggtagcgataaagcaattttttatagaagaaaggcggaaatattattatggaaaagctgatttatcttgataatgcagccactaccaaaacaaggccggaggttgtggaagcaatgcttccttattttacagaatattatggaaatccatcttctgtatatacattttcatcagaaagcaaaaaagcagttaccaatgcaagagagattattgcaaagtctttaggcgcaaagacaaacgagatctactttacagcaggcggaagtgagtctgacaactgggcattagttgctacagcagaggcttacagcgcaaagggcaagcacatcatcaccagcaagatcgagcatcatgccatccttcatacctgccagtatctggagagcagaggttatgaggtaacttatctggatgtagatgaaaatggtgttgttaaattagacgaattaaagaaagcgatccgtccggatactattcttatttctattatgttcgcaaacaatgagatcggaaccattgagccaattaaggagatcggtgagatcgcaaaagaacacggcattttattccatacagacgctgtacaggcttatgcccatgtgccgatcaatgtagatgagtgccacattgatatgttaagctccagcggccacaagttaaacggaccaaagggaattggtttcctgtatatccgtaccggtgtaaagatccgttcctttatccatggcggagctcaggagcgtaagcgccgtgcaggtactgaaaatgttcctggcatcgtaggttacggaaaagcagctgagatcgctatggcaaacatggatgagcgtattgcaaaagagactcagttaagagattatctgatcaaacgtgtaacagaagaggttccatttaccagagttaacggttccagaaccaatcgtctgccaaacaacgtaaactttgcattccagtttatcgaaggcgagtctttactgatcaagttagacatggcaggtatctgcggttccagcggttctgcatgtacttccggatccttagacccatctcatgtactgttagccatcggtctgcctcatgagatcgcacatggttccctgcgtctgaccttaagcgaagagaacacaatggaagaaatggattatgtagtggagcagatcaaggagatcgtttcttacttaagaggtatgtctcctttatacgaagattatatgagacgcacaaaagaaaaataagtataggtaaataaccaaccatcaggaggaattttttcatgtattcagaaaaagtaatggaccattttcagcatccaagaaatgtgggagaaatagaagacgccagcggcgtaggaactgtaggaaacccaaaatgtggtgacatcatgcgtatctacttagatatcgatgacaaccagatcatccgtgacgtaaagtttaagactttcggctgcggcgctgcagttgcaaccagcagtatggctactgaattagtaaaaggaaagactgttcaggaagcaatggaagttaccaacaaggcagttatggaagcattagatggacttccaccggtaaaggtacactgctccctgttagcagaagaagccatccacgcagctttatgggactatgctcagaaaaacggtattaagatcgaaggattagagcagcctaaggagaacatcggcgaagaggaagaagaggaagagtattgagtagaaaagtagtagtaggcatgtcaggaggagttgactcctccgtggcagcctggctgttaaaagaacagggttacgacgtcatcggcgtgaccatgcagatatggcaggatgaggataccctggttcaggaagcagaggggggctgctgcggcttaagcgctgtagatgatgcccgccgtgttgctatggacttgggtatcccttattatgtcatgaattttaaaaatgagttccgcacccaggtcatggattattttgctgcggaatatatggcaggacgtaccccaaatccatgtatcgcctgcaaccgttatgtaaaatgggagtctctgcttcgccgcagtctttccattggagcagattacattgctaccggacattatgcaaggatcgaacagcttccaaacggcagatatgccattaaaaagtcagtaactgcagcaaaggaccagacttatgccctttataacctgacccaggagcagctttcacataccttaatgccggtaggaaactatcacaaagacgagatccgcgatatggcgcaaaaactgggacttccggtagcttccaagccggacagccaggaaatctgctttatcccggaccatgactatgcatcctttattgaagaatacacaggaaagaccatggaaccaggcaatttcgtagatttagatggaaatgtgctgggacgccataaaggtatctcccattacaccgtaggccagcgaaaaggtttaaaccttgctatgggatatccggtctttgtagtagctatccgtccggagacaaatgaagttgtactgggaaatggccaggatgtatttacagatgtagtccgctgcaacaagttaaactggatggcattagaaggtgttggagaggaagagatttctgtcaatgccaagatccgctacagtcacaaaggcgcaccatgtaagatccgccggatcggagaagacatggtagaatgccgttttgaagagccggtacgtgctgcaacacctggacaggcagttgtattctaccaggatgattatgtagcaggcggaggcacgatcttatgagaagaagagaaaaagtcagtgtaaaggcagctgccattatccttggagcagcgcttttgacagcaggctgttccgggtatcagtccagcgaagaactgaggaaaaatgcggaaaacgttcaagctgaaattgtgcctggtgaggaaaacgaaactgaaaatggttctgacgaagcaatcggcgaaaaagcagaaagagaaaacacggaagcatctgttaaacagggcagcaatcccaccgcagagatcatccaaagcgaaacggaacgcaccacagccccggcgccggaatttaaagcagtttccgatacggtctatgtaaagaccaacggcggaagcgttcgtgtccgttcttcctgtgatacttcaaccagtgataacattgtagcaaatgttggaaatacaacagaacttacccgtaccggtaccagcgaaaaatgggacagagtggaatatgaaggaaagaccgtctatatttcttctgactttgtgaccacagaagttccaaaggagccggagacaagcgcagcttcttctaatgcagctgcagatggacaggtgacattaaattcttcctggaaatacgcagattttgccaaaataaaatccggggcagcagtcctttaccgcagtacagcttctgaaaagaagaataaggtgatcgcagtgaatgcgggtcacggcacaaaagggggaacttctgtaaagacccagtgtcatccggatggaacagccaaagttacagggggtactacaggtgcaggtgctacttctgcagtagctgtttccacaggaatgacattttctgacggaacagcagagagcaaggtaacactggctatggcaaaagtactgaaagacaagcttttggcagcgggctatgatgtactgatgatccgtgacggggaagatgtgcagttagacaacattgcaagaagtgtgattgccaataacgcagcagactgccatattgctcttcactgggactctacaaccagcaacaaaggcgcattttacatgagcgttccagatgtggcttcctataagaacatggaaccggtcaagtcccactggcagcagcacaacgcactgggagcaagcctggtagaaggccttaagagcgcaggtgtgaagatcttttccggcggttctatggcaatggatctgacacagacttcttattctaccgtaccttctgttgatattgagctgggagacaaggcgtctgatcattcacagagcaccttaaaccagttaggagatggactggtagcaggtgtaaaagcttatttcggacagtagtatgtaacttcccgcatcctgtgcgggaatggtgtagttgctttgcatggggaatgtaaagttaacgctatatagcagaaaggagttacgttatgagaaaggtaaaacgttttgcagcaatcgtccttacagcagcacttttaagtcctacgactgcctatgcaggcaatgtggaagatgccaaagctctttatgagcaggtaacagaaaagcagaaatccgttacggatatgaatgcgtattatgattatcagattcatctttccggcagtgccttagaaggcgtggaagatctcagcaatatgcgtctggaaatgaatgtgcggatgaaccatttaacagacatgggaaatctgcagtacagcagttacagccgtgccacagtacctggacaggaaccgatgatcagtaccatgtattataaagatggtacctgctacatggaaactgccggaacgaagatcaaatatcctatggatctgacacagatggcagaacagatcagcagtcagacaatgatgctggcttcaggacaggcgcaggaagatctgatgacagatttccgcctgtggacagagggagaagaccaggtaattggttttgtgatccagggaagcaagatgaccgattatatggatcagttattcggcagcctgggaatggggagtgccctgctttctgaaagcggcatcaccatgagattttcagatattccatgtgaatatgtagtagatccaaacggtgactgcattaaaatgcgtatgaagatgaacatggaaatgggagtagaaggaaagaatattgccattgacatggacggggatgtaggaattgcagatccaggcagtcctgtagagatcaatttcccgaatttaagtgaatataaggatatgtcagaggcttttgcaagataaacaggcctggtgattgcgtcctttcggggaatgtggtacaatcatatccaatgaagcagatgtttttctgaaaattgcaggaaaacattaaagtagcaaaggagattaaaactggaatgagtgagacaccgaatacaattacggccattaagaaggaacttcttatgcgccttggacatgatgcagatattttcgccctgatctctctgtgtacaagagagccatacgtagtatgtgatgaggagacctttgatgatgaggtattcttattcctggacgaagaagaagcaaaaaaagaagctgcaaaactggcagaggagaaagtacctgttacagttgccaagatcaatggaaaagatatgctggtattctttaccggtctgtatacactgggtgtaaatgccctggtggtaactgacaagggagagaaggcttccatgcagataagcgacattgtaaagcgcaaatccccggaagatatgccacagggaactgtatgggtagaaaatccggccttacatctgacagctgcttatctggcacaggaaatgcgccgtccggctgcatctgcagataaggaaagaatggctgaattaaacgaagagctgactgctgactttaagaagggaacctttatttttgccctgcagaaagaagaaaagggtattccgttagtaaagttaaaagacggacagctgtatcagcctgcatttactgatattttagagttccagaaatttaaccgtgagaacaagatgcgcccggttgtagtagaagctgccaaagtaccaactgtactggcaaatgaagcacagggcattatcttaaatgtaatgggtgtaaacctgcctttaactgtttccagaccaaaggtacaggctgcagaacctaagcgtaccattccggttccggtagaagagatcaacaaagcacttgaaaaataaattcaggtttttgtttcattgatgaatgttcagccaaaaagggactgccgtatattcttgtatgcggcagtcctttatgactataggagttttactgtttcaggaggtgttttatgggcggacaggagccggttaaaacagaaaaatatttcagcacaggtctgctggcccacgtagatgcaggaaagaccacactttcagaggcacttttatatcttaccggtgccatacggaaaatgggaagagtggacgaccgggatgcatttcttgatacctatgaattagagagagaacgcggtattaccattttttcaaaacaggccatatttgaccttggggatacccatgtaaccctgcttgatacaccgggacatgtagatttttccgcggaaatggagcgtaccattcaggttctggatgcagcgatcctggtagtaagcggtgcagacggagtacagggacatacaagaacggtatggagattgttaaaacgtcatcacattcctgtatttttatttgtaaacaaaatggatcagtccggctgtgatgcggctgctcttatgaaggacctgaaagcaggtttagatgaaaactgtgtggattttggcggctggtccggtgaaaaaggagaatgggatcctgaaaaagaggatacagataccttttatcaggagctggcagtctgtgacgaggcagtgatggaagcctattttgaaaatggttccataggatcagatgagatcggccgtttagtccgtgaacgaaaggtatttccctgctattttggttctgccttaaaattaaagggtgtggaagaactgttagcaggctttcagcgctatgggatggcaaaaggggaaaggaaaacggaaaaagacagtccttttggagcaaaagtatttaagatatccagagacagtcagggcaaccgcttgacccatttaaaagtcacctccggtgtgctgaaggtgaaagatgcctggggggaagaagaaaaggtcaaccagatccgtatttattccggggccaaatttgaaagtgtaaaagaggctcctgcaggctgtatctgtgcagtgaccggccctatccatacccatccgggacagggaattggcagtgaaccggcatcagaactgcctatgctggaaccggttcttacctaccgcatcctgctgccgtttgacagtgatgtacataaatgtctgcagcagtttaagcagttagaagaggaagaaccggaacttcatgttctctggaacgaagaactgggagagatccaggtacagcttatgggagatgtacagatcgagatcttaaagcatatgctggaagagcggtacggtctgttggtaggctttgatacaggaaatattgtatacaaagagaccattttaaatacagtagagggcgtagggcattttgagccgctgcgtcattatgcagaggtgcatctgctgttggaaccgggagaggccggaagcgggctgcagtttgatacggtgtgcagtgaggatgtattggaacggaactggcagaggctgattctgacccatctggaagagaagatccacagaggtgtgcttacaggagcggagatcacagatatgaaggtgactttgctgacagggcgtgcccatatgaagcatacagagggcggagatttccgtcaggctacttaccgggcgctgcgccagggactgatgcaggcggaaagccagctgctggaaccgtattatggatttacactggaacttccctctgaaaatctgggacgggccatggcggatatggatcggatgtttggaacctttgagccgcctgtgactacggagaacggtgttctgttaacaggaaaggcgcctgttgcctgtctgcgtgattaccagagagaggtgatcgcctatacaaagggcagaggtcacttaagtctctggtttaaggattatgaaccatgtcacaatgcagaagaggtgatcgaggcagccggttatgatccggaggcagatctggaaaatacagccgactccgttttctgctcccacggagccggatatctggtgccatggtaccaggtgaaggaatatatgcatatggaaagtccgctggagaagctggggcggcgagcaaatggggagaatgatactgacgggggcatgcagggagatatgggccggtttgctggtgatgcaggtattggttcaggtgcgaatggttcttcatctggtgctggaggcggcagacctgtgtctggcagtgctgtttcaacgtctggttcgtccacatctgcatcagcagctggaaaacgacagggaggttccggtcctggcacctcctggagtgatgacaaagaactggaagagattttcaaccgccgtttcggtgcaggaaaatggcgcagcagaccggatacacagagtagtcccactgccccgaggaccagaaattattctgcaaacatacccttaaaggcgaatgaaacaaagaagccggaagaggaagaatatctcctggtagacggctacaacattatttttgcctgggaagagctgcgggaactttccaaagtaaccattgacggagccagacagaaactgatggatattttatgcaattatcagggatataaaaaatgtaccctgatcctggtatttgacgcctataaagtgacaggaaataccggcgaagccatcgattaccacaatatccatgtagtgtatacaaaagaagcggaaactgccgatcagtacattgaaaaactggcccataagatcggacgccagtacaatgtaaccgtagctacttctgacggactggagcagctgatcatctatggacagggctgtcatctgatgtcagccagagacttaaaagaagaggttgcctgggctaatgagcagatccgggaagaaaaggcaaaactggaaaaatctgggaaaaattatctgttccatggtgcagatgaagaactggcggcatatttagaagacgtccgtcttggcaggagagaatagaaatgctttacacatatccacattattatagaaagtttcagtgtattgcctcagaatgtgaggatacctgctgcgcaggctgggagatcatgatcgatgacaaggcgctggaaaaatataaaaaggcaaaaggtcctgttggaaacaggctgaaaaattccattaactggaaagaaggctcttttttgcagtatcatcaccgctgtgcctttttaaatgatgaaaatttatgcgacctgtatacagagatgggaccggacagcttatgccgcacctgccgcatgtatccccgccatgtagaggaatttgaaggcagcagggagtattctctctgtctttcctgtatggaggcagcgaagatcattcttggctgtgaggaaaaggtgcagttccttacaaaagaagatgaaaaagaggaaacttatgaggatttcgactttttcttatataccaagctgatggatgccagggacctgatctttaagatcttacaggacagaagcctggatatgcggcttcgcatggcagaggttctggcattagcccatgatctgcaaagaagagtgcgggacaatgtgctttaccagacagatgctttatttgaaaaatataatagttccagaagagatggttatttcaaagaaaaactggcgggaattacaggatacagccgttatgaagtaataaaagcgatcatggatcttttagaaaaaatggaaccgctaaatcaccagtggccggagtacagagatgaattaaaagtctgtcttttaggtgatggggaagcagcttacgaagagatgagaaaagcctttttccaaagcccggaagcagaaaaaatgaacctctggacagaacagctgatggtgtactttgtatacacctacttctgcggtggcgtatacaatgaaaatccctatggaaaaatgaaagccgccatcgtatccaccattatgatccaggatatgatgatggtccactggaaaaaacatggtacactgactttaaaagaggcagcagatgtagcccaccgttattcccgtgagatcgagcattccgatgagaataagggactgttggaagagacgttgacccgcgaagaagagtttcgtttgagggcactgcttgcggctttatgaaaataggtatataatgagtgaagggaaaaacaagcggctgcgaagcagacatttgttgccaagcatatcgaggaggcgcctgtgacgcgtccgctgatttttcacgaaccattaacgaatgagtcgtctgcgtcagcagacagtagagcgcgacagcgcgtgttcatgagtgaacaaatgagatagaaaattaaaggagaagatacaaatgagtgaatgttcccataactgtggtacctgcggcgaaaactgcagcagccgtacccaggataaaaaaagctttctggaagcgctggcaccggaaagttctgtaaaaaaagtaattggtgttgtcagcggtaaaggtggtgtaggtaaatcacttgttacctccatgatggcagtaagcatgagccgcaagggcaaacatgcagcaatcttagatgcggatattaccggtccgtctattcctatggcatttggcgttgcccatgaaaaagcaggtgtttccgaagacggaaaactgatgatccctgcaagatccttagagggtgtagatatcatgtctgccaaccttctgttagaccatgataccgatcctgtcatctggagaggtcctgtgatcgcaggcgctgtaaagcagttttggactgagacactgtggaaagatgtagattacatgttcgtagatatgcctccgggcactggcgatgttccgttgactgtattccagtcacttcctgtagatggtatcattatcgttacctctcctcaggaactggtaggaatgatcgtagccaaggcagtaaatatggcaaagaagatgaatgtgccgatacttggtattgtagaaaatatgagctatctggaatgtcctgactgcggaaagcacattaatgtatttggtgagagccatacagagcaggttgcagaagaatacggcttaaagctgttagcccagatcccgatcgatccaaagatcgcccagatggtagatggcggtcaggtagaatatattgagatgccatggtttgaggaagctgtaaaggcagtggagaacctgtaaacacaggcggaaagtggtgacacgatgaatatcaatcttaatcctaacagtgagctgaaccagtccattgtcaatgtgccggatgtggtccaggtcccggatgtatggatcaatgaagcaagacagtttaggatggcaatgatgatgtatgcctgtgccatccgtgaagtaaagacaaaattagaagtactcaatgatgaattatccattaaaaaccagagaaaccccattgaaatgatcaaatcccgtgtaaagaagcctatgagtatcttagagaagcttcagcgccgggggctgccggtatcggtggagtctatggtgaaaaatctggatgatgtggcaggtatccgcattatctgttcttttgtagatgatatttacgaagtagcggaaatgctggtgcgccaggatgatgtaactgttattgcgattaaggattatattaaaaatccaaagccaaacggctaccgcagttaccatatgatcattgagatcccggtattcttctcagacagtaagaagcccatccgcgtagaggtacagatccgtaccatcgctatggacttctgggcaagtctggatcatcagttaaagtataaaaaatcctttgtggacttaaatggtgagatcagcggtgaattaaaacagtgcgctgatgtgatcgcccagacggacaacaagatgttagagatccgaaagaggatcgaagcccagggtgtgactgtatcaagggattaatactcataaaaagacagggtttgcgtaatgcaaaaccctgtctttttatacagggccatggccgggagattttctgagaaaacctgaagctttatggtcttaaagcctttttttgccagctggggaaggaggacagataaaaaggcagtgcctaaatgtttatttctaagttccgggagaacttcaaggctgtataaatagacagagtttccctggggtgcaagaaaacaggtgacttccggtgcggtcagattttctgcagtattctgtgttagaaggctgcggctgccaacagcctgccaggctgtgctgctagtattttccaaaatccggcagtaaagcatatctgctgttttttcatttgccattgtttcaaatcccgttaattcccgctccatcatatattcatcccaggcatgctctgccccaatatgttccaggacatttttccacagtttattttcagtaccacaggaaaaatacacagagccttctcctggaatttggtcttcttcacaggcagcagccaggatagaagaaaaaattccctttttacgaagatccgggtgcacaaaaggcacacattcaaagctgtcatctcctgtttggtatacagccatacagccggacaggtacgttttagagaccgggcatgatttagaaatcaggtccggatcagaagctgcaaaccaccagccgtcagcatccagtatatctgtaagcgctggcgtgataccccaggatccggtattatctgtagaggctgccatggatgcacacaaaagctgttctatatataattggtctgatgaatttaagttatctttaaagaaaatgtccatgaaataagctcccaatatagtttttataatgtttttattgtaatccaatggttttcagggcgcaaccactgttaaatgcccggattgtattttttgtgtatttccggcattatctcttgaatatgaaaaaacgcagtggtagaataatccagaaaaatttaacggacgcaaaagaaaaaatattgtcatccgctaaaacatcaggaggaaaacaaagatgaaatacgtaagacagatcggtattatcctgggtatcactctggctggagaatttttaaaccagatcctgccccttcctgttccggcaggtgtatacggtctttttcttatgctggcagcccttatgtcaggtgttgtgaaaatggaaagcgtagaaggaaccggcaattttcttatggataccatgtccatgatgtttgtaccggcaactgtaggcattctggagtgtgcaaatgagctgaaagccgttcttattccatttctgatcattatcgcagtttctactgttgtagtaatgatcgttaccggaaaagtggcacagtttatgatggaatcagcagagaagaaaaaggagaaatgatcaaatgagtacattaagagagatcctgggaaattcccagtactggggacttaccttaagtatagcggcttatctgtttgcctgctggctgaaacagaagacaaagcttgcctttttaaatccgatcctggtatctgttatcgtgatcattgcatttttactgggagtaggaattgattatgatacatataataaaggagcatcttatttaagctggctccttacaccggcaactgtatgtctggcgatcccgctgtataagcagcttcacctgttaaagaagcatggtgcagccgttgcagtaagcattacttccggcgttgccaccagtgcagtgagtattttcctcatgtgccgtgttctgggactgtcccacacccattatgtaacactgcttccaaagtccattacaactgctattggaatgggtgtcagtgaagaagcaggcggtattgtaacactgactgttatcagtattatcatcaccggtgttttaggaaatatggttggcgagactgtacttaaacttgcaaagatcgaccacccggtagcaaagggactggcatttggtaccagcgcccatgcagtaggtacagcaaaagcactggaattaggagaagtagaaggtgccatgagcagcctttctattgcagtggcaggtctgctcactgtgatcgcagtgccgatcgcgtctaagtttatataagcgcagagaaatcttcaaatgcgtcactggcgcattcttgatatgcatggcaaaacaagcggctgcgttagcgcggaaatctaagtctatataaagatatttcacctgccccggcattgccggggcacatctgtatttgcaaataaaagaaaggggttacgtttatgaagaaaagaagtgaagcagaaatttctaccacctggaagttagaggacatggtcccggataatgagacctgggaaaaacagttaaaagaagcgtctggtgagcttgaaaaatacggggaatttaagggcaagctggcagagtcagcagaaaacttataccagtgcctgaaatttgatgatgagttcagcttaaaagcagagcgcctgtacgtatatgccagaatgcgttccgacgaagatacagcaaatgacctgtatcaggacatgttttccagggcacagcttttaaatatccgggcttctgaaaattcagcttatatggttccggagatcttatccattccggaagaaatcttaaaagaatacagaaacagccatccgggcctgaaacattttgaccgcctgttagatcagctgttagagcgcaagagccacacactttctaaagaaatggaacagttactggctcagtcctacgaggcaacccagggcggaagccaggtatttaccatgtttaataatgcagatgcccgcttcccggctgttcatgacgcagagggaaaggaaattcctcttacccatggaaattatattgctctcctggaaaatcagaacagagacatccgaaaagaggcttttgaaaacctgtatagtgtatacaagcagttttccaataccttatccgcagcttttggtgccaatgtaaaacaggctgtattctatgcaaaggccagaaattatacttccagccgtcagtcaagcctttccgggaatgaagttcctgagtctgtatatgacaatctggtggcatctgtgagaaaaagtctcccactgctccacagatatgcttctctgaggaaaaaactcctgggcgtagaagaacttcacatgtatgacttgtatgtgcctatggtggcagaagcagaccgtcattatacctttgaagaagccaaagacattgtaaaaacaggtcttgcacctatgggcgaagagtacctggggcttcttcaggaaggttttgacaaccgctggattgatatatatgaaaatgaaggaaaacgaagcggcgcttattcctggggcgtttatggctgccatccttatgtattattaaatttccatggaactttaaatgatgtatttacactggctcacgaaatgggccattctatccacacctggtactctaacaagaaccagtcttatacttacagcggttataagatctttgtggcagaggtagcttccacctgtaacgaggctctgctgatccgtcatttattaaagaacagcaaagataaacaggaaaaagcctatttattaaattatttcctggaaagcttcaggggaaccttattccgccagaccatgtttgcggaatttgagcagaaagcccatgagatggcagcagcaggcgagagcatgacttcccagagtctttgcaatatttataagaagttaaatgaagactattttggtccggatacagtgatcgaccctgagatccagtatgaatgggagcggatcccacatttttataccccattttatgtatatcagtatgctaccggtttttctgcagccatcgctatcagcaggaagatctttaacggggaacctggcattttagaaggatataagaagtttttaagcggcggctgctccgatacacccatcgaactgttaaaactggcaggtgtggacctgtcccatacaggcccggtagaagaggcacttaagttctttgaggagctgttaaatgagtttgaggaactggcataaaaccagtttagatccgctgcaaacatgacaatattgaaaaaaagtgtataatcccaagttttcttgaagaaataggttatctatgttaaaattaggataatcattcagaacgaccagttttggatcatggaaatacctgtaatgaatatacaaatgtagtgtaaaccaaggaggaacattatgatcagtcagttaatcgaaaaaatccagaagacaaaggctccaatctgcgtaggcttagacccaatgctttcctatgtgccagagcacattgtaaaaaaagcatttgacgcttacggagagaccttagagggagctacagaagcaatctggcagtataataaagagatcattgacaatacttatgacctgatcccggcagtaaagccacagatcgctatgtacgagcagtttggcattgagggattaatggtttataagaaaaccgtagattactgccaggaaaagggtctggtagtcatcggtgatgcaaagagaggtgatatcggctctacttccgctgcgtatgcaaccggacatctgggcaaagtacaggtaggctccaagtcctacagcggttttgctactgatatgctgactgtaaatccataccttggaacagatggcgtaaagcctttcgtagatgcatgcaatgcaaacgataagggaattttcgttctggtaaagacctcaaatccatccagcggcgagttccaggacaaactgatcgacggccgtcctctttacgaattagtagctgaaaaagtagtagagtggggcaatatgtccatggacggaacctacagcaacgtaggtgcagtagtaggcgctacctatccggaaatgagcaagatcttaagaaagctgatgccacatacctacttcctggtaccaggatacggcgcacagggcggtactgcagcagacttaaagcactgcttcaatgaagatggtttaggtgctattgtaaactcctccagaggtatcattgcagcatatcgtcaggaaaaatacaaacagtttggtccggagcactttgcagaggcttccagacaggcagttattgacatggttgctgatatcaacagtgtactgtaattagcaagaaataaaaaggttggaaaaacaacatggcaaaattaaaaatgacagctgctgttacctcacaggtacagctggcagaaggaatttatgacttaagactggctgcgggtgagatcgcagcccaggctgtgcctggacagttcgtatccctttattccaaagacggatccagactgcttccaagacccatcagcctttgtggtattgataaagaaaagggagaactgcgtctggtataccgtgtggcaggagccggaacaaaggaattttccgcactgacagcaggagatactattgacgtattaggacctcttggaaatggtttcccattattagaaggaaagaaagcattcctcatcggcggcggtatcggtatcccgccaatgcttgaacttgcaaaagcattaagcaaagtaaacggtggtgaaatggtacagtccgttatcggctaccgtgacagccacatgttcttaaaagaagaatttgaagcatacggctctgtaactgttgccacagaagacggcagtgtaggaacaaagggaaatgtattagatgccatccgtgaaaatgatctgaaggcagatgtgatctatgcctgcggaccgactcctatgcttcgtgccttaaaggcatacagccaggaaaaaggcatcctctgctacttatccctggaagagaaaatggcctgcggcattggtgcctgtctggcatgcacctgccagacaaaggatgtggacgaacattcccaggtacataacaagcgtatctgtaaggatggccccgtattcctggcagaagacattgaactgtaaagtacagtaaaaattgcccggatcaaaacgggcggacatgtgagaaagcaggaggcaggaccgaattatgaatatgagtgtaaagatcgccggagtggaatttaaaaatccggttatggaagcgtccggcacctttggttccggtatggaatacagcgagtttgtagatttaagccgtcttggcgctgttgtcacaaaaggtgtggcaaatgtgccgtggccgggaaacccgacaccaaggatcgcagagacctacggcggcatgatcaatgccattggtctgcagaacccgggtatcgatgtatttgcaaagagagatatcccatttttaaagaaatatgatacaaagatcgtagttaatgtgtgcggaaagaccacagaagattacattgatgtagtagagcgcctgggagatgagccggtagatatgctggagatcaacatttcctgtccaaacgtaaaagagggcggtatcgccttcggtcaggatcctaaggcagtagaagctattacaaaggcagtaaaagcccatgcaaaacagccggttgttatgaaattaagcccgaatgtaacagatattacagttatggcaaaggcagcagaggcaggcggcgcagatgccatttccctgatcaatactttaaccggtatgaagatcgacatcaaccgcagaaccttcgcagttgccaataaaacaggcggactttccggtccggctatccgtccggtagctgtacgcatggtctatcaggcagcccaggcagtaaaagtgccgatcatcggtatgggcggtatctgcaatgcagatgacgcgctggaatttatccttgcaggcgcaactgcagtagctatcggtactgcaaacttccacgacccatatgcaactgttaaaacagtcgatggcattaaggcatatatggaaaaatatggaattgaagatattaacgaactgatcggtgcagtgaagtaataaaacagtcacataagaaatttgggaaaaattggaaaaataaggagggcattaccatggaaagctataagcaggaatttattgaatttatggtagaaagcaatgtattaaaatttggagatttcaccttaaagagcggaagaaagtccccattctttatgaacgcaggcgcctatgtaacaggtacccagttaaagaaattaggtgagtactacgcaaaggctattcatgacaactttggtctggactttgacgtactctttggaccggcttacaagggtattccgttaagcgttgcaaccaccatggcgatcagcgatttatacggaaaagacatccgttactgctccaaccgtaaggaagtaaaggaccacggtgataccggtatcctgttaggaagcaagatcaaagacggcgaccgtgttatgatcattgaggacgttaccacttccggtaagtccattgaagagacattcccaatcattaaggctcagggcgatgtagagattaagggtctcatcgtttccttaaaccgtatggagcgtggaaaaggaaccaagagtgctttagacgagattaaagatctgtacggcttcccaactgcagccatcgttaccatggcagatgtaacagagtgcttatacaacaaggaatgcaacggtcaggtagtgatcgatgataagatcaaggcagctcttgatgcatattatgaacagtacggcgcaaagaacgaataagagccggaggtagttgcaatatggagagagtatataaaacaatgaaggttacaggagccggctgtattgcagcaggtgttgtgatcctggtgacaggtcttgtggtaggcattatttccattgtcaatggagcgctgcttttaaaacgcaaatccgaaattgaattttaggatgcggggtcacagatgatcagaaacacaactaaacgccagaagatgggatgggtactgtttatactgtacctgtgccttctggcgtatttcatgtttttttcagagtcattcggacgaacggatacagacagggactacgcctataacctgatcctttttaaagagatcagccgttatttcaaatattataatgtactgggatttccattgtttatgatcaacattgtgggaaatatcgttgcttttgcaccctttggattttttctgccggtcatcagcagaagaagcaagaaatggtataatacagtgacttttggttttacctggagcctgatcttagaaacattgcagctgatatccaaagtgggcagttttgatgtagatgacctgttccttaatacactgggagcagctttcggttttggctgttactgtctggtacagcatatgcgattacgttacaggaggaaaatacattgagacagatcggaaacaaggtttcctatgtgaaaaatccctttgcaaagaacagtttttactgtctgggtctgggaatcgcctcccttcttttaggtgccttaagcatgtatttttctgttaaaaacgcaggacagggaggcttaaatacaggagcctacggattttccagtatggcagcagccattatggggctctggtacggcatcctttcctttacagaagatgactgtaattatattttagccaggattgggatggctttagaggggatcatccttcttgtctgggtcatcattatatttaccggtatcttcagataagtgataccaggatcaaaagggcaaaatataagtatcaaagcaggcagatgcggatgtacaaggagggaatacattttatggattacagaacaattttacaggaagaaaacgatgccgtaagagaacggctggacctttccatggagcgcgtggcagccatgggagaagatgatatccggcagccttacggcaattattttagatgcgtttcccgctttatattaatgatcggggaactggtaaaagaaagagaagagggaaagaaactttctctgtctcagttacaggagcgaaatcacagactttacgaggatattttaccggaacattatgaggaaagctttgcaaacccggactatgcggtaaaagaactgggagaaggctacggacagatcttatctgctctttatacagagatccggggcgatattgtgtacgcctttgaaatgcggctggaaaatatcacgatcttaaacgaagtctttttagaggtatataacctgtttgtccaggtatgggaagaaggaaccgaccagccaaaagagcagcagatcaaagatgctttttactggtatgtcagtgattattcagacctgctgcttccatggcggatcagggaaggactggacccgaaactttcttttgcaaaagatatcattatggaaagtgacttaaatgatctttcctatttatatgagtttggtgagtatatctcagagtctgagttaaagctggctgcttttatgaacacccttcctcaggagactgtggataaaatggcagatacctatacagaaggttaccgcaaaggcttttctgttatgggaagagacattaccaaaaagaagacggtggttgtagaatatcagcttggctttgagcggatgatccgcaaagcagtggaaaatttccagaaaatgggactggaacccatcttttatcgtgctgctgtagagtccttaaaccgcagaccaaacggaaaacgaggctattttggcgcttctgccaacaagcagtatgattatgatcaccgttatgacagcgccctttatatgggaaatgcctttaaagagagaaaactttctattttaaaggctgcttatgagcagtacagtgaactggcttcctggtgtgccggccctgctgtagtagagaccttcggggaagaaggctttacaccggtaaataagaaaacagcccttgctttaaatgatcatcagcaggagctgacactagcttatgcaaatgagtcacgccaggtcatcaaccagtatatgccgggagatgaaaccagctttactattattgctttcccgaagccggagatcggaccggattttgaggacattttccgtgagaccattgccatcaacacactggactacgaaaaataccagaagatccagcagaagctgatcgatgccttagacaaggcggactatgtggagatcacaggacgggatggaaatgaaacttccatgaaggtgcagcttcatacgctgaccgaccctgaaaagcagactaattttgaaaactgcgtatccgatgtaaatattccgttgggagaagtatttacctctcctgtgcttacaggcacagaaggccttcttcatgtaaaagaggtttatgtggaagattatctctttaaagacctgcgtatggtatttaaagacggaaaagtaaccgagtttggctgcggaaatttcccagagttcaaagagcagggaaaagacctggtaaaacaggtgatcatgcgcggccacagctggcttccgctgggcgagtttgccattggaaccaacaccacagcttatgcgatggcaaagaaataccagatcggcagcaagctgcctatccttattgctgagaaaacaggtccacattttgcagtaggagatacctgctacagttttgcagaagactcacctatgtacaacccggacggcaaagaagtgatcgccagagacaatgagatctcccttttaagaaaagaggatatgtcaaaggcatatttcagctgccatacagatattacggttccttattgcgaactgggagatattgtggctgtgggaaaagacggcagccggatcacactgatcagacagggaagatttgccttagagggaacagaaggtttaaatgaggctctggattaatatttatttcacaaaaagttcattattttactcttgtaaagaagagtagatttaggttatgattaagagtagcctaaaatgcacatgtttcagtataagtactgaagaaagcattcaggacgttcgcactgcgggcgtcctgttcttattgtttacagaaaggagtattttacctactatgctaaaagttttatcaaaatgcatccgtgagtataagcaggcatccctgaaagcacctttgatggtatccctggaagtggtaatggagtgtatcattccatttatcattgcacagctggtaaaccgaatgaaggcaggtgccggttttagggagatcgccatgtatggtctggtactggtcattatggctacgctttcccttatattcggcatcactgcaggtaatgcctgcgccactgcttcctgcgggtttgcaaagaacgtgagaaaggacctgttctataagatccaggacttttcctttgaaaacattgaccggttttcatcttcctctttagttacccgcctgactacagacgtaaccaatgtacagatggcctatatgatgatcgtccgcattgccatccgtgcaccacttatgcttatttttgcttttgccatggcctttatcatgggcggcagaatggcatgtatttttatcattgtagtacccatactgggaattggccttttttccattatccgtctggtcatgccgctgttccgcgctgtatttaacaaatatgatgctttaaataattctgttcaggaaaatattaagggcatccgtgttgtgaaatcttatgtgcgggagaagtatgaaaaagagaagtttgaccgcgcagcagaagatgtgtgcggtgattttacccgtgcagaaaagatccttgcatttaacaatccgctgatgcagttctgcctgtatacagttacgatctttgtgctgtcttttggttcctataccattatcaccagccggggactggatctggatgtaggacagttttccgctcttttaacctatagtttccagatcttaagcagtcttatgatggtgtccatggtctttgttatgatcacactggcttctgagtctgcaaagcgaatcgtagaagttctggaagaaaagagcagtctggtaaatccggaaaatccggtttacgaggtaaaggacggttctgttgattttgaaaatgtaagctttaaatattctaaaaaggcagagagaaacgctctggagaatattaaccttcatattaattccggtgagactattggtattatcggtggaaccggttcttccaagtctactttgatccagttgatctcccgtctgtatgataccacagaaggtgtggtaaaggtggggggaagagatgtaagggaatatgaccttaagacactgcgaaaccaggttgctgttgttttacagaagaatatcctgttttcaggtactattgaagaaaacctgcgctggggggataaaaacgccactccagaggaaatagcccatgcctgcaagctggcccaggcagatgaatttgttctccgtttcccggataagtacaagtcctacattgaacagggcggtgctaatgtttcaggtggccagaaacagagactttgtattgcaagagcacttcttaaaaagccgaagatcctgatcttagatgattctaccagtgcagtagatacaaagacagatgcaatgatccggagcggatttaaggaatttatccctgagactacaaagatcattatcgcacagcgtatttcatctgttcaggaagccgatcatattattgtaatggatggcggaaagatccaggcagttggaaatcacgaagaactgatgaaagccagcccgatctacagggaagtatatgaatcacagaacaaaggaggcggtcaggatgaagaataatggaaaagccatggcaaaggctggaaaaaagacatttttgcgcctgatccgcactattttcggatttttccctgtgctgatgcctctggtactcataggtattttatttaatgctattgtaggttctattccggcagtttttatgcagaaggttattgctgtggtagaacagaactggcagtccggtgactggaatggctgcaaggatgagatcctgcgttatacaggtatccttcttacactttatggtctggcgcttgcagcttctatcttctataaccggaaaatggctgagatcacccaaggaactttaaagaagctgcgtgaaaaaatgttcaacagtatgcaggattttcctgtaaaatattttgacactcataatcatggggatattatgagttactacaccaatgatattgacacgctgcgtcagctgatctcccagagtattccgcagtttttaaattctgctgttatggtaactacagtattctgcgtcatgctttactatagtatctggatggcactggtggtagttgcaggtgttgtgctcatgctgcatattataaagaaagtagggggaagttctgcaaaattctttatccagcagcagaaagctattggtaagacagaaggttttgtggaagaaatgatgaatggccagaaggtcattaaggtgttctgccatgaagaagaaagcgaaaaggcttttgatgctattaatgatgagctgttccatgtgtctgaaacagctaataaatacgcaaataccctgggaccgatcttaaacaatatcggtaacctgctgtatgtggcagtagctcttgccggaagcttattcttgatgtttaaagtgcctaatttaagcatttcccgattaccattttctattagtatcgtagtgccgttcttaaacatgaccaaacagtttgcaggaaacatcaaccaggtttcccagcagatcaatgccgttgtcatgggtatggcaggcgcggagcgtatttttagcctgttagatgaaaagccggaggaaaatgaaggatatgtaacactggtaaatgcagtggaaaatcctgacggaactctttcagagcacaaagaacgtaccggtgtctgggcatggaaacatccccacagtgacggaacggttacttatacgaggctgacaggtgatgtacgttttgaaaatgtagattttggttatgatcctggtaagacagttcttcataacattacactgtatgcagaacctggtcagaaggtagctttcgtaggcgctaccggtgccggaaagactactatcactaatctgatcaatcgtttttatgatatttctgatggaaccatccgttatgatggcatcaatatcaggaagatcaaaaagtcagatctgcgccattctttaggtattgttttacaggataccaacctgtttacaggtactgtaatggaaaatatccgctacagtaacccggatgcaacagatgacgagtgcataggagcagcaaaactggctggtgcccatgactttatcacccgtctgccggaaggctatgagactgttattaccggaaatggtgagaatttatctcagggacagagacagctgatctccattgccagagcagccgctgcagacccgccagttatgatcttagatgaggcaacatcctctattgatacacgtacagaggctatcgtacagcggggaatggacgccctgatgcagggacgcactgtatttgtcattgcacacagactgtccacagtacgaaactctgatgtgatcatggtactggaacagggccacatcatcgagcgcggcagccatgataagctgatcgaggagaaaggaaagtattatcagttgtatactggggcgtttgagttggaatgatagcgcgggtttgtaaataggatttatagatttgtgagaaaaaatgttcgctcggagtctttctgtgcctgatttggtgagaagattttttgtcagttgtgcccagatttctgaggcatacgcggcgcgtatgttgatgaaatttgggtgcgactggcggaaaatcggccacaaaggcaggtgcatgaaaggcttcgagaggacatatagaaaagggggaaggcagatggttgaaagaaaagcgttcttaaaagcctacaacattgacgaagacgattttaaggcagctgacatttcctgggaagagctggcagcgatctatgatgattatctgtcaaaagaagaaaaacttcgtgggatcggcaaagactttgtcaatgattatctctatgatattgagcgggcgggaattcattcctaccgctaccgtaccaaaaatccgggacatcttttagagaagatcatacgaaaaagaaaagaagatccggagaaattcaaaaatctgaaccggagcaattattacaaatacatgaccgatctgatcggtatccgtgtattcttcctgtaccgggaagactggatctacttccacaaatatattaccactgtatttgaaaatgatccaagtatctacgtaaaagaccgaggccgggattttgacgaagatccgtcccactgctatattgcagagcgtccaaaggtataccgtagaaatggtgatacacgcatttatgatgaaaaactgatcgatatcaagtcagacggcatttaccgttctctccactacattatcaagtataaaggatattatgtggagatccagggaagaacgctgtttgaggaaggctggagcgagatcgatcatgacatcgtctatccatattataaagacgatgaaatgttaaaagatttttctaccttattaaaccgcctttccggtatggcagatgagatgagttcctatttccgcaggatgcgcagtgtgagagaagagcaggggttactgtcacaccattcgggggaaggtaaaaaagaatgatagttcaaccatgacagtaacaaaaatacgctttcttttccaggttccagaaggaaccatagaagagaaagcgtattttttatatacagcagtgagcaagaatgttatactcacatgctttctgttttaaccagccagatgcagtacattgatcagtaagatccagcttaatccatagtaagaaacaacagcaaccaagtcgtttacagttgtgatcagtggaccggaagcaacggccgggtcaacattgatctttttaaagaacagtgggatacaggtacctacggcaccggagatcaccattgctaaaagtaacgcagctccgatacagccggatacagcataggcgaatgcaaaaggctttccttttgcgaccacaatgtataagccaatggctgtgaaagaaagtacgccaaggatcagaccatttgagaaggcaatgcgcatttccttccataccagttccagcttctgctttccggtaagggactcgtccataagcacacggatggtaacagccagagactgggtaccaacgtttccggccatgtccagaatcagggactggaagcacatgatcagtgtcagctggcttactacctgttcaaagaggcctacaacagaggaaactaccatacccagagccaacagaactaacagccatggaagacgtttctttaaactttcttttaaaggttcctttaaatcttcctcagcagtcagacctgcgaacttagcgtaatcttcacccatctcatcatcgaccaggtctacgatactctgggaagtgataacacctaacagtttgttgttattattaaggactgggatagagtcctcggaatagtctttcagtttttcaatacagtcatcgatcagttcatgaccatatacataaggataagaggtaacgatcagatcctccaaagcggagtcctgtcttgcaatgatcagatccttcagatccattgcgccataaaaggtctgatcctctgttaccataaaaatggtagaaatattgtcattcttagctgcctgttctaccagactgctcatggcctgctttacggtcagattttcgcggatcacaatacagtttgtggtcatccagctaccgatctcatcttcatcgaaggctgcgatcacggcaatatctttttttgcgtcatcatccagaagttctgtaagaagagagcgtttttctttggaagtcatttttaaaacatccacaacagcgtctgtttccatagcagaaaggatagcagcagctttctttacgtccatttcatccagatattccgctgcctgtttctggtcgatatgctcgaaaatatcagaaagcatatctgtatcaaggatacggcagatcttgcgccgttcagctaaggtcagttccgggaaaatgtcagcaaggtcgttttcatggtaatcttccagtttatttctcagaatacccggtgaggcattgcttcggattacagacaggatctcctggctgtgatcctgaacttgaactttgttttccatttcagtctccttttcatctttattttattcagttttcaacacgccatcctgtataaaacatgattttatgggcacaacaaaacctgcacctgtaaaatgtgcagaaataataaacgcagcatgtatctgtgcgtctgaggatatgcgtgacaactaaattgaaagacggtatccgtcctccatttacagttttgcgatggatattacaggagttgtaagaacgggataagaaatgaaaaagaagtcctgtatttcaagttatatgaaattatacgaaacagaatagaccgctgtttcctttatatcccgtgcgtctacttcgcccatgactatcgcaaccgtccattctgttcacctgcctttttcgtaagattaatgacctgatggcctgaagcgtttattaacaacttctttacatattataaagcctgagctcaaaattttcaatataaaatgtgtacaggtactgataaaattgtgtaaaatttctcaaaaaggatatgaaaaaaagatggcacgaaaaatagaaaaagtgtttcgcaccatcttttatagtgagatattcttaacgcctgatatctggcagaaaggggcttataaatataaataggttacagtcggtagcatactttgcctggatttaagatcattttcggatcaaatacacgtttgataccttccattaacgccatgttggtctcaccaatagactctaccagatactggatcttaccggagccgataccatgttcaccggaaacaagtccgccctgtgcggacgcctctttatagataaggtcaaagaatttatctactcgctttttaaattcttcttctgtaaggtcattggagcactcataaatatgaagatttccatcacctgcatgtccaaaggaacggatcacaagaccacattcttcaccggtcttatttacaaattcaagataagaagcgatctttgtaacaggaacgactacatcacactcatcaaggagcttagtctcttccatgatcacttccaggaaagcggaacgggctgcccaggcgtcacgcattttggcaggactgtcagcaaccaaaacgtccatggcaccggcgtcaaggaccagttcagctgcctgttcaagaagtgtatataactggtcttcgctgtcagaatccagtgtgatcagaagataagcgcccacaggctgtccctccatttctctcgggaaagtagaacgtccggtatggcgttcggaagccagtacgatctcacgttccataaattcgatggcctgaggatttaaagaagacatttttaacttcggtactgtttcaagagcagttttcagattttcaaatggtacgatcagggaagcgcttgcctttggagcaggaatgatctttaaggtcagttccgtaatgatgcctaatgtaccttcagagccgatcataaggttcaacagagaataaccggaagaggtcttggaaaccgtagcaccaaggtgggtgatctcgcccgttggaagcacaacggtcatggcgcgtacataatctctggtggaaccatatttaacagcgcgcatgccgcctgcattagtagctacatttccacctacgcaggcaaatttttcacctggatccggcgggtacatcatgccttttgtcaggcagtccgcagcaaggtcatttaaaagaacgccacattcaatatttacaacgaaattttccagatcataatttaagatccggttcatttttgacatatcaagaagaacaccgccaagaaggggaacagcgccgcctgcaagtccggttccggcacctcttggtgtaacaggaatggtattttcatagcagatcttcataatagcagctacttcctctgtggaacgtggctggactaccaggtcgggcatatgagtgccgtaaataggcatttcatctctggaaaaatcagggttgatatcatcgccggtaaggatgtgatccgataccgctttcagcttggaaatgatctcaggtgtgagagtattatattgatccatagtttataacctcctgtgctgtatatcagggcgtatcttttttaaaacagagccctgttcatctggcagtttcattatataaaaaagggccaaaattgtgcaatgtgtaaaatatacaaagataaaaaggggattttgtatgtaattttattaacaatgcacaataaaacagggatgacttttacatgattttccggaaaggattttccggaaaagatgagaggggagaaaaaaacggaaaggctttgccggtttttaaactatggtttgttagagaattaacgaccttgaaacagcagtaaaaatgacaggaaataccatgagaaaaatgctgtttttttatgttgaaaatcaacaaaaattgtgaaaagtgaaagaggaatgggaaaagcgcaaggattttggggaatacacttgtatagtgaaattattttaggtataatgaaatgagatatactaagatgaaacgggcagactgccgttttatcagacaaaaaataggaggaatactcgtgaacagagagaagattattgtaatcgactttggcggtcagtacaatcagctggttgcccgccgtgtacgtgagtgcaatgtttattgtgagatctattcttacagaactgatattgaaaagatcaaagaaatgaatccaaagggtatcattttaaccggcggaccaaacagtgtatatgaagaaggcgctgcaacctgcagcaaagaactgtttgaactgggaattccggtacttggactgtgctatggtgcacagctgatgatgcatttattaggcggtcatgtatgcaaggcacctgttcgtgaatacggaaagatcgaagtaaccgtagatcagtccagcaagctgttcagtaacgtatctgaaaagaccatctgctggatgagccacaacgattacatcgaaaaagaagctcctggatttaagatcatcgctcacacagacaactgcccggtagcagctgtagagtgtgcagaaaagaacctgtatgcgatccagtatcatccagaggtacttcatactgtagaaggaaccaagatgctgtccaacttcgtatacaatgtctgcggctgtgcaggtgactggaagatggatgcattcgttgagaataccatcaaagccatccgtgaaaaagttggaaacggtaaggtgctgtgtgcactgtccggcggcgtagactcctctgtagcagcagttatgcttgcaaaggcagttggcgaccagctgacctgtgtattcgtagatcacggcctgctgcgtaaaaacgaaggcgacgaagtagaagaagtattcggaccaagcggcccatacaacttaaatttcatccgtgtaaatgctcaggatcgtttctacagcaaattagcaggtgtagaagagcctgaaagaaaacgtaagatcatcggtgaagaattcatccgtgtatttgaagaagaagcaaagaagatcggcgctgtagacttcctggtacagggaaccatctatccagacgttgtagaaagcggtctgggcggcgagtctgcagtgatcaagtcccatcacaacgtaggaggacttcctgactacgtagatttcaaggagatcatcgaacctctccgtgatctgttcaaagatgaagtacgtaaagctggcttagagcttggtatcccggagaaactggtataccgtcagccgttcccgggtccaggccttggaattcgtatcatcggcgaagtaaccgctgaaaaagtaaagatggtacaggaagcagacgccatctaccgcgaagagatcgcaaacgcaggtctcgaccgcagcattggccagtacttcgcagcactgaccaacatgcgctccgtaggtgttatgggcgatgaaagaacctacgactacgccatcgcactaagagccgtaaacaccatcgacttcatgactgccgaagcagccgagatcccgtgggaagtacttggaaaagtggcaagcagaattgttaatgaagtgaagcatgtgaacagagtgctttatgattgcactggaaagccaccggctacgattgagtttgaata

SEQ ID NO: 3628 - DNA, 45446 bp, Unknown
  gut microbiota DNA sequence
atgggctttactaagcctattgaacaaatatttatttagtaacttattaaccaaaatatatgtatttatgtatctaaaagatattatacgaggagtgaaagatatgataaagatcgatctgatcaccggatttttaggtgccgggaagacaacttttataaaaaagtatgcttcttatctgatgaaacagggaaagaagatcggaatactggaaaatgattttggcgccatcaatgtggatatgctccttttacaggatttagaaggggataactgcacattggaaatgatcgccggaggctgtgacgcagactgccacagacgcagatttaaaaccaagctgatcgcaatggctatggaaggctatgaccgggtgatcgtagagccgtctggcatttatgatgtggatgaattttttgacaccctttatgaagagccgttagaccgcttttatgagccgggaaatgtgatcgcactggtggatgcaggcctggaagaggatctttcaaaagaggcaaaatatctgctggcatcagaagtagcagatgcaggctgcgtgcttttcagtaaatgcgatgaagtgtctcaagaacagttgaaagccaccctttcttatctgaaccaggcaatggaacaggtacattgtaaacgaaggtttaccctggatcagatcctgtgcaaaaactgggaagatctggaagaggctgattataagcgtctgctcaactgtgaatatcgcatggaagattatgaaaaaatgcatttagaacaggggaaaatgtttgattctctgtactatctgaatttttccatggatccggatcagctaaaaacagcagtagaaaatatgtttagggatccttcctgcggaaagatctttcgcatcaaaggctatataaaaaagggagaaaacggctggttggagttaaatgccaccagcagggaattttctctgaaaccggcgccaaaaggccaggaagtgctgatcgttattggcgaaaacctttcaaaagaggcagcagctctttatttaggccgtaaaccggatgtttaagccaggttttaaacaaaaaacagtttacaaaagataagggacaggttataatatttcccgttggacaaggacagatatggcagagttgcagatgctctgtgcataaataaaatgttctcacaaaatcaggcacagaaagattttgagaggacattaagaaaaagctgatggcttctgtgagacagatggattgcagatgacatcagcttttttacggtgactttcatctgatcatgaaaggaaattattatggaaccatattactatacaaagatgagcaagccccaacaggctgtctactatgccatttaccaggggctcatggcactttccgacagcttccaggtgccgaaattagaaggacgggaactaagcgacgtatttttccagctgcgtttggaccatccggagatcttctgggcagagggatttcattaccggtattatcaggactcggccaatatcacttttttgccggagtatatttttgaaaaaggaaagatcaaagaacaccagaaagcattaaaagccagagtggaaaagctggtccgccctgctatgaagctttcggaatgggaaaaagaaaagtatgtacatgattttatctgtgaaaatgtacattatgataagttaaagaaatcttattctcatgagatcatcggtcctttaggacagggtgtaggggtatgtgaagggatcgccaaatctgtaaaagtgctttgtgacgccttaggtatctggtgtatgatcgctatctgcggaaataatcctgaaaaagggatcaaataccgtcatacctggaatattgtaaaaattggcggcacgtattatcacctggatgctacctttgacaatacgttaggtaagcacagctttggtgcaaaggagatccgctacgattactttaatctggatgataaaaatattttccgggaccatgagccgctgatcgcgccggcgccggcctgtacggacggggatcatttttattacaaagagaagaaaatgtcctttacaaagacagaagatgtgtataaacgttccctccaggcagcaaaaaagggaaaaatgcttacctttcactggagaggcggctatcttacaagggcagtcctggacgaattgctggatctgatcaaaaaagcaggagcagaaaagggaaaagtagcccgtattgctttaaactggcctcaggcagtgctgcgtctggagtatgtggaagatggccaggaaaatgttactatggaagaggcaaatgaaggagagcaggagtgagattagactgttcgggaatggaatttgaaaagctggcagatctgttggaacaggggcagtttgaacttttgaatctgccggttggtgatgagaggaaaaagccatcggatatccgtctggtgtatatgatgaatgacacagcggaaagctttctggtattccatgaggcagtgcttacaggaaattacctgccggattacgagggagaactaagcgcttccctggataaagaagaaacagataacacggacgcggaaggtgaagaaaaggggcggtatatcctggcggtccatcagggagatacagtctgcaccctgttttttaaagatatcagcctggaatgtgagctgtatgattatggtgagatcggtcatttctgggtgaagggatatgagtatctgcgccagttagaatataagatcgctattttaggggataaatgggaatatctgggagaagattgctgcagtgaagaagagaaaaaactggcatctttaagagaatttccgcctttaagttatctgttttatccggcagcttcactggcctatgtaagagaaaaagaagaaccgtggaaatgttcgccgctggcagcaaaactggtggaagaggctgcaaaacaggagaaagatacctggtttgcaaaaatggtatccctgtataaaagataccccgtcagggtacttgccagatacattgcctggatgtttcacagagaagcccataagagagtaaccgatcatctgatccggcagatggatcaggcagcggtcatttatccaagacgttattttggagaagagaacgaaaaaaagcataaaattctgtttgaaaaagccaacaaacgtaaaagagatcttgaaaaacaggggatacaggcggaaatctttagagaagaaccttttgcaaaaggcgacgatggaccctttaaagtgtatgtaatgcagtttacagttaagaagggaaatcacatatctgcagttgaagaaatccgataattgcaaatgatcataaccacatactgctatgcatcagccccgtgcggctgttggcaggttttgcagacaatatctattatataaaaacagcagaggaatttacccctctgctgttttcgtttctaataatttcgttaatttttccagtaaaactttcgcttcctcgccctgttcccggatataagaagcttccggtacttcaatatcatggatcagggaatttcgcatttttcgtaaaaaggcgatctggttaatacattctttatcaagcactcccagtcgttttaaagcgttgatattaaatacgcttacggaacgggaactgcgcttggtcacacggtttaagagattttcaagaggcacccattggccaaagaagtagttgatggcttcctgatgttccaccgttaaattggagtcatcggagcgcagcttctggtatgcctggtatctcttttcatttccgctgatgatctggtcaatgatctgctgggaaatggtacgtttgtctttttcaaattttacagactttacgataggtccgatatcttttgcccgtaatatctttaagctgcttaaaaagcggaacagcagctcaatatttcccatacgaagcttgatatcttccggaaggaaattattgcttaaataattatataaataagaggcaagctcaaactgattggcaaaagtagctttactgttctgaatcctttcatttccagcagcctgaagccgttccagggcgatttcaccggtaagcaccagaccatttaattcatctaagatagccagttcttcctcagaaagtgttccctgcataggcttatacaccaggtcatgttccacctcagaccaggcatgcatcaggacagaagctacctggatctcgatcctggcagcgcagtagcgtttttcggaaggctgtactatttcctctttcatatgcacccggtaatgattggcccagtagccggaaaaacgtttgttataggtaggcggtttggactgttccgggaactgtttgcgctcgatcacctgaaaaagatcgctgatcagggagtctacttttatgcggtcacctgggaaatacagggacacacggatgccgcaaaggtcagcaatatcctcgtagatctctttcatgttcttatagggaaccgtgcgcttgacatttctgcgcagtatcttactttttaaacggccggggtttttgatcctgtaagtgaccatagcccggataccggctgactgtaaggcatcttccagttgagaagaggaaatacgtcccagattttcataaaaagtaagtttctttttatagttttcaataaactggttgatcagatccataaatcctcctttgcagtcggatatctgtaaaaatacagatatagtaattttcagaattttctgtcactattatagcacaggagcaatcgctctgcaagaaagagagcagtatccggggggaaaatgatcatggtccagccaaaatatcttaatgagaaaaattatgggaacagcctacttgacaatataccctggtggggtatataatgcgtatattcccaggggaatggtgggaaaataaaggagaaagacaggaacgtttatggaagaagaaaaatgctgctgttgccaccataaaacaaaagagcgttcagaaaaggaatacaaagacctgatccaccgcttaaaccgcattgaaggccagatacggggaattaaagggatggtggaaaaggacgcttattgtccggacatattaatacaggtggctgcagccaatgcagcgttaaacagttttaataaggtccttcttgcaaatcatatcaggacctgtgtagcagaagatataagagcgggaaaagatgaggtgatcgatgaactggtgaccaccttgcagaaacttatgaaataagtggagaggaaaatgaaggttccgcctgcgtcagcaggcagtggagcacgaccgtgtgtggaacctaaacaggtatgaacaggtataagaaaggagccagtaatacaatgaagcagtatacagtaacgggaatgagctgtgcagcctgcagcacccgtgtagaaaaggcggtttccaaggtgccgggagtaacttcctgctctgtcagccttttaaccaactccatgggcgtggaaggaagtgccacagaccaggagatcataaaagcagtagcagatgcaggctatggcgcgtctgcaaaagatgccgaaggagaaaaaaacggtggagcaaacagcgctgcagcttctgaagaggcccttgcagaccatgaaactcctattttaaagaaacgtttattatattccgtaggttttttacttgtccttatgtatttctccatgggacatatgatgtggaactggccgctgccggcatttatggacggcaaccatgtgatgatgggtctggtacagctgtatctgacagtgatcattatggtcatcaaccagaagttctttattaacggttttaagagcctgttccatggtgctccaaacatggacaccttagtagccttaggttcctttgcctccttcggctacagctcctatgcactgtttgccatgacttatgctgaacatcagggagatgcagaggcagtgatgggctacatgcatgaattctactttgagtccgctgccatgatcctgacactgatcacagtcggaaaaatgttagaggcccgttccaaaggaaagactacagatgccttaaagagcctgatgaagctgtcaccaaagactgccgtagtggaaaaagagggaaaagaaacagaagtacctgttgaacaggtacgcatcggtgatgtatttgttgtccgccctggtgaaaatataccggtagatggtgtcgtattagaaggaaacagcgctgtaaacgaagctgctcttacaggtgaaagtattcctgtagacaagcaggcaggagaccgtgtttccgcagccaccattaaccagtccggttttatccgctgtgaagctacccgcgtaggagaagatactacactctcccagatcatccgtatggtcagtgacgcggcagctaccaaggcacccatcgcaaaagtggcagataaagtttccggtattttcgttcctgctgttatttccattgcagtgctgacggttattgtatggctgatcgcaggtgaaagcgttggttttgcccttgcaagaggtatttctgttctggttatcagctgcccttgtgctttgggacttgcaacaccggttgcaatcatggtaggaaatggtatgggtgcaaagaacggtatcctctttaagactgccgtttccctggaagaaacaggaaaagttgagatcgttgcattagataaaacaggaaccattacaagtggtgagccaaaagtaacagatgtactggcggcagatggaacttcagaagaagagctgttaaaattagcatattcactggaaagcaggagcgagcatccgttagcaaaggcgatcgtagcctatggggcagaaaaacaggcagaacagatcccggttagtgaatttaaggcacttccgggaaatggcctggaaggaaaagtgggagatgcggatgtaaaaggcggcagcctgaaatttgcacagagccagacggagatatccgaaaagataaaaagccaggcagaaaaactggcagaagagggaaaaacacctcttatgttcttaaaaaatggtatacttgcaggtatgatcgcagttgccgatgtgatcagagaagacagcccacaggcagtaaaagagctgcagaatatgggtattgaagtagttatgctgaccggtgataatgaacgcacagccaaggccattggccgccaggccggcgtagaccgtgtcatcgcaggcgttcttccggatggtaaggaagaagtgatccgcaggttaaaagaacagggaaaagttgccatggttggtgacggtatcaatgatgcccctgctctcacaagagcggatatgggtattgccattggagccggtgcagacgttgccattgacgcagcagatgtcgttctggtaaagagccgcttaagtgatgtgcccgcagccatccgtttaagccgcggaacccttagaaacatccatgaaaacctgttctgggccttcttctacaatgtgatcggtatcccccttgcagcaggtatctggatccccatctttggatggaagttaaacccgatgtttggtgcagcagccatgagcttatccagcttctgcgttgtgaccaatgcattaaggctgaatttattaaatatcaaagacagccgcaaagataagaagatccgccgtaaagcagccgctcctgcaggagcagtagttgctgcggcagaaataaatacagaaacaaaaaaggagaacaaaacaatgacaaagactatgaaaattgagggaatgatgtgcggacactgcgaggcagctgttaagaaggctctggaagcattagacggagtagcgagcgcagaagtaagccacgaaaagggaactgctgttgtaaccttagagaaggatgtagataatgcagtccttacaaaggcagtagaagataaggattataaggtagtttctgttcagtaagcgatcatagatgaacaaaaatgaataaaatagtataaaatacaaaatagtataaaatgaatgaaagaaacgcaggaaccggtccgaaaagatgggtttctgcgttttttgtgccacggcacattctttttataaatttagcatataaaaaaatcagggaagaggtgttacgtctgtccgtttgcgtggggatttgttgatctcaaaatcttttttaatgacttcgttgtaaacagagatcacatggtaaaatgcctcgatctcttcggcgctgcactgtttctgaagctgggacatagtcttggcgatatccaggatatcatacattttatgtgccttactgacacgggaaccttctgctgtcacatatagataaaggtttttcgcatttccgtcttttttgcgcttttcgatcagttccagtttttctaatttagtaaggatctgggaaatagttccctttgttttatcccagtactggatcagttcaccggaagaggttccgggatggtcttcaatataactgagtgtgtggacttccatcatggtaagcgtatagttatcaccatactggtgtgcggacatgatgtagtcattataatgcataaagaaggcgatgcgcttctgatccagcagccggtttactatccattccgcgaagtgatcgaagataacggaagaatttttgtaaataaccagctgcattatgaagatggaaaatacaccattgattttgaagattttgaaaagaagatcgtagataacaatgtaaaagtatttatcctgtgcaatcctcacaaccctgttggcagagtatggacaaaagaagaactggagaaaatgggagatatctgcttaaagcacaatgtagtgatcatggatgatgagatccattgtgactttacatatcctggcttcaaatttacaagcttcatgactctggatgaaaagtaccataacagtctggtactgtatacttctccaagtaagacttttaacgtagcaggacttcagccagccaacattattattaaaaatccggaactccgcgcagcataccgtaaggcaaatgcagcagcaggttacagccagggaagcattatgggacaggttgcagtaaaatctgtttatacaaagggtgatgaatgggtaaatgaactggtagagtatattaccggaaatatgaattacatgcgtgatttcgtaaaggaaaacttcccgaaggctcatttcgtagatcctgaaggaacctatcttacctgggttgatttttcaggatatggttttacagatgaagaattagagcacattatggtagaagaagcacatctctggttagacagcggtaaggtattcggaccggcaactgcacagtttgaaagatttaaccttgcatgcccgagagctaccgtagtaaaggcaatggagcagttaaaagctgcactggacaaccacacaaagtgggcatagtcagggggaagataagagatgaaaactttctggaatacatataaatcgtctattttactgctggcagctatggtagcaggcggtgtgattggatttttctggggacctggagcaagtgtgctccagcccattgccgatacatttttaaatctgctgtattgctgtgttgtaccgctgatcttctgttctttaacagcggcgatcgcaaaaatgcaggatcttgcaaaactcagaaagatcttaatgatcttcctgatcggtgttattgtctccggtgttattgcatgcctgtttatggtagctccttgtctggtcattgatccggcggaaggttctactgtttctttaacacaggatgtagcagatgccagtggaagcatgaatgtactgggaatgtttacagtcggtgatttcccgcttctgttctctaaatctaacctgatggcactgatcgtatttactgttattttctctattgcgatcatccagatcggtgaaaagggcaagccgatcgtagaagctatggatcgccttacagcagctatcgtaaacgtgatcaatatcgttatgaaactggcccctttaggacttggctgttattttgcgatcctgatcggttctaacggcagtgatgtgatcggaccgttgtcaaaagcaattgtcatgtacctgtttgtgatcgttgcctattatgttgtttcacagacagtatttgcttatatcggtggcggcatggaaggtgtacgcatatggtgggcaacctgcgtgccatctaccttaactgctcttggtacctgctcttcagcagcaactctgccagttaatttacagcaggcaaagaaaattgatattcccgatgagattgcagatcttgttattcctttaggtgcaaatcttcacaaagatggcgcatgtgtgatccagatcattaaggtagcgtttttatgctcagtattccatatggaatatgcaaccccacgaaacattttaatgtctatcctggtagctgttattgcatctgttgttatgggaggaatccctgcaggcggttatgtagctgagatctttatcatatctgcattcggcttccctacagtagctatcccgatcatggttctcatcggaaccattaccgatgcacctgcaactgtagtcaatgtaacaggtgatactggacttgccatggtcattacaagatttgtagaaggaaaagactggatccacagaaaaaaactggcacaaaaagcagcataaaataataatataactgcgcatccctcatggtcggaccggatctgacatatgggggtattgtgcgtttctttacaagcgtttataatggtttaatgggaatacaaaaatgctttgcagaagatgcaggcacgaaaaggagaatttcttatggaaaacaagaaactgggggcgttggcctttctgccgctgatcgtatttttaggaacttacattggttgtggtattgtgttttcggttatgggagcggaaagtccttttggctatttcccacgccatgtagcgttgcttgtgggaattgcgtctgcccttattctggcaccgggggtgaagatttcagagaaggtagatgtccttacagaaaatatgggccgcagcggtgttatgatgatcgttctgatctatcttatggccagcggatttcagggcgcagcagcagctattggcggcaagacttctgtaattaacctgtgtttacactatattccggtcaagcttctggttcctggcgtatttatgatgtgctgctttatctctacagccatcggaacatccatgggtaccatggcagctatggctccggttgctttgggcgtagcggaaggcgcaggcttaaatgcggctatcgtctgtgcggcagtgatcggcggttcttattttggtgataacctgtccatgatctctgataccaccattgcagcagcagaaggctgcggatctgagatgcgtgataagttccgcatgaacttcttcattgcctttccggcagctgttctttctctgatcttttatggatttatagggggagcaggcagcggaagcattgaagtaggtgcttttgacctgttccagatcgctccttatattgtcgttttagtaactgcgttaatgggtatcaatgtagctgtggtactgttcattggtattttaatgacctttattgtaggactcttacagggaaatgtaggcttctttgatatcgccatggcagtaggtgatggaatggctgatatgttcagcatcagtattgttgctatcctggtatccggtgtgatcggtctggtacggtattacggcggtattgaatggatgatcgatacgatcaccaaaaagatcaaaaacagaaaacaggcagaatatggtatcggtatcctttccggtattttatccggtgctatggtcaataatacgattgctatcatcgttacctgtcctattgcaaaagagatcggcagcaagtacaagatcgcgccaaagcgtctggcaagcctggtagatatttttgcctgtgcattcttagctgttatgcctcatgacggcggtatgctgatgacatctgaaatggcgaacatatccccgtttgctatcctgccatactctgtttacccattattcctgattattgcaacctgcatcacgatccaggcaggacttttaaggacagcggaagaaaaacagaaaaaataggcagaaaaagcaataataaaataggatttttcggtaaaatagacaaagaccgaaagaaagtgcattgacttataggggtaatgatgatattatagccctatcgttattttcttgataatattggttgctctaaggcaacacgcaaaaccaattttgaacgatattatgtgaaacagatatttgttcaaaattggtttttgttttaagggggaattattatgtttcagggaattaaaaaattattcggtggaaaaaaagaggaaggccaaatccttgcacctgtagccggtcaggcagtgcctttaagcgaggtgccggatcctgcatttgcccaggagatactgggaaaaggcgtagccatcctgccttcggaaaatgaatttaaagcgcctgcatccggagaggtaactgtattatttgaaaccggacatgcggtcagtatccgtacagagagcggtgcagatgtgatcgttcacattggcttagacactgtgaatttaaaggggcagttctttatcacccatgtaaaacagggtgacacagtaaaggcaggggatctgctgatcacagcagatatagagcagatcaaagcagcgggttatgaggtaataacaccggtgatcgtctgcaatgtttctgatttcccggatatggtatgccatacgggaaaagccgtaaaagccatggacgagatcattactctgtaatgaacatcaacatggatataaaggggatttgaaaccaggagaagggttcaaataaataagccgggataaaaaaacggcaacaaaagaaaggggtttttagttatgatgaagttctttcagaaacttggtaagtcactgatgcttccagtggcgtgtctgccagtatgtggtatccttatgggtatcggatacatcctggcaccggcagctatggcaggtgaggttcagggatttactgcggggggcttagcttactcaatcggactgttcctgatcaaagcagggggtgcgttgatcgataacatgtcctggctgtttgcagtaggtgtagccgtaggtatggcagatgactcagatggtacagcaggtctggcaggtcttgtttccatgtacatgatcaccacactgttaagtcccggtgctgttgccggtattaccggacatgaggcagcacctgcatttggaaagatcgtcaaccagttcgttggtattctttccggtctcatcggttctgcatgttacaacaaatataagactgtaaaactgccggatgcactggcattcttcagcggcaagagagcagttgcgatctttacagctatttattccatagttgcagctttagtcctgtttgttgtatggcctctggtttacggtggtctggtagcattaggcgaagcatttatcggaatgggtgctgttggagcaggtatctatgcattctttaaccggcttctgatcccatttggcctgcaccatgcgttaaactctgtattctggtttgacgtagcaggtatcagtgacctgagcaatttctggggcaataccggtgtttacggacagactggtatgtacatgaccggattcttcccatttatgatgttcggtcttccggcagcctgcattgctatgtatcagactgcaaaacctggtaagaagaaaattgtttacggacttttagcttccgcagcgttctgttctttctttacaggtgttacagaaccaatcgagttttcctttatgttccttgctccgggactgtatgtagtacatgctctgttagcaggtattacagcaggtatcaccgttgccctgccgatccgtgcaggcttctccttctccggcggtgctgttgatatggtactcagttcctttacaccacttgcagaaaatccatggctgctgatcccggtaggtctggcagttggcgttctttactatgttgtattccgtttcgcaattgccaagtttaacttaaagactccgggacgtgaagatgatgatgcagaagagttaaaggcaactttagcaaacaatgattatacttctgttgcaaagacagtcctggaaggcgttggcggtcctgaaaatgtggcttccattgacaactgtattacaagacttcgtctggaagtaaaagactatacaaaggtcaacgaaaaagtgatcaaatctgccggtgttgcaggtgtgatgcgtccaagcaagacctctgtacaggttatcatcggaacacaggtacagtttgtagcagatgaatttaagaagctgtgcaaataaagagtatctgaaaaatttatctggaaaattaagttagatcatatggaaaagatcgcagtaaagcggcatttaaaacgtcattttgctgcgatcttgttttattttcaggtcattgttttaaaaattgtttctcaagcatccctactgcctgatacaacacacaggacaacaggcagagcatgatcagggcgctcatcagttttgtcatctcaaaggtctgggaagcataggtgatgaggtagccaagtcctgctttggcgcttaaaaattccccgatgatcacaccgaccagacagagaccgatatttactttcatagtgctcattaacagaggaaggcttccaggaagaagaaccttggtaagtacctctttttttgcgccgcctaaggcatagatcaaacgtattttgtctggatccatctggttaaagcctgtatacagagtcataacagagccaaaaacagcaatggacacagcggctacgataactgtgcgcatacggtttccaagccatactaaaagaagaggggcgagagccgattttggaagactgtttaaaagtaccagaaacggttcaaaaatctgggctgcaaaaggactggaccagagaaaaagggcagttaaaaggctgataagggtacataaaagaaagcttaaaagggtttctgttaaggttacccctgtatggagaaaaaggctcttatcaagaagcatgttccacagacagaaaaggatctgggaaggggaactgaagataaagcggttgatcaggccaagagaggcagtcagctcccagagggataaaaacaggatcagaatcattatacggcagatccggatctggcgggtctgcaaaaggaggcgggcttcatattcctgctgtctggtcatcttttatcagctccttccataaagtattaaagtaatgggaaaattccggacagttgcgcctttttagggggctgttacagtcatcaggaaaagaaaggtaaaggactgtgcggatacggccgggtctgggagtgaggacgataatacggtcagcaaaactgatagcttctgacaggtcgtgggtcactaaaatagcagtctttccatttttccttaaaatagagctgatatcatcacataccataagccttgtctgatgatcaagggcagaaaatggctcatctaataaaagcagatccggtttcagtgccagtgtacgtatgagagcggctctctgacgcatacctccggaaagggcagagggctttgcgtgttcaaaaccggcaagtccatagtcagagagcaggtcagaaagttcctgttttgtttcagtattcaattttttctggatctcaagtccaagggaaacattggaaaaaatatcccgccattcaaaaaggtggtccttctggaacatatagccgatcccggtggcatttttgggatttttttccaaaagttccccatccagaaaaatggcgcctgcttccggcatgttcagtccgcataagagagataaaagagtggattttccgcagccggaaggacctacaatggctataaattctccggtatctacgttaaaagaaatatcagaaagggccagcgtttccctgtttttactatggtaggaaaagctgaccctggaaacctgcaatttgggtttcatagaaaggctccgaaaagaaacgttcttgctttaatatacgttactgttctggttctggtgcaggtgtttcattttgtgtatgtccgtaattccatgtaacaggagtaggacgggaaggatcaaagatctgggaagcgtcaaacagatcgcttaaacgctttttagcaggatcttcctggatcatatcttcgtacaggcggtaaccatccaggtttcttctggccattcgcagataatcaggtcccttctggatccatgcaggcttgctggcatctacattacagaagtagcggaaacctttggaagcaaggtactggtaacgatagttttcctctgtatacgggtgccagtcagcaacatcgtttccattaggataaatgtaaatatcggtcggtccgatcagggactccacctcattttcccatttatccgtatctgtgtagaaacgttcatcactgatcttgtatggattttccggatcgtcagaaacgcccatccacaggtgtccccagctgtgacttgccagttcccagccgtcatcccgtaagcactgtgctaccctggcagcctgctctttctcgctttcataatccggggtttcgctgtaggaagaagcagtgcggtatcctaagatcccttcataaccggtaagtgcgataatagccttggctcctttgtaggagaaatccgggtgctcatcaataaagtcgtttaaaagagggatcaggtcataagaacctgtggaaatgctgccgtcatccattttcatttcgcaggtaggccgtccgtcctcgccgactacgatcttgcttgcaaatccgtctccatccatatatggatagtagcatacgtcatcctgggacataacaatgggctttttgccttccggcagcatgatcgttccccaggtgaaagcaggatttccgttttcatctgttgtttcgtaggcaatatcgtggatgcgcactaaaacgtagccgtcattgtaaagggcatctaatatttttaagaactcatccttggtagtcataacggaattatatccttccatacgggagtcaccgtcaaatgctttggaagtgtccatgatcagagagtggaaaaatacatgggtcacattttttacatctgcagctaccagagagtccttttgggactggaaggaagcaagggcttcgctgatccgtggatcggactgaatggaaggatcctgggacagaagttccattgctttgtcgtagtcataaccttttgccagacggtctgcctgatcgatcaattgcccaatgggatcgtcgggatcagcttctgctgatgcagacggggtcccgttgcttttcgtagcttcagaagcagtggcaaaaaccggacggtctccaggctgcttttttaaaacaaagcgtgaaaaggcaaaaataccgcccccgagaacaagggcgatcacaaaaagaactataaaagtaggaaggtggcgggacaaatggaagaaaaatccccggcggttccgtctctttctaaaatttaaattactcataaaatctcctggtcatatttctgataatcatattgcttgtggtattgctgaaattcctttaagtctatacagtatagcataaaatacgcccgttggatataacatatagtcctttttgttgattttttaacatctccgtggtattctaagaaatgaagtaaaattcaacagaatgtgaggtctcaaaaatgggagaaatggttaaagatccaaattgcgcatattgtgtggaaggagaactgttagctaagtttggttatccttgctgcgagatgaagacaggtaagctgtatgtattcaaagagcagagcaagagaggaagagtgatcttagctcacaagaaacatgtcagcgaactgatcgaactgactgatgaagagagaaatgactattttgcagatgttgcaaaagttgccagagccatccacaaagtatttaacactgataaggtaaactatggtgcatacggtgataccggacatcatttacatttccacattgttccaaaatacaaaggtggagaagaatggggcagtacattcgagatgaacagcggcaagaccattcttacagatgcagaatatgaggaaatggctgaagcgatccgccaggcattaaaggaagtctaaaacagaataaaattgaaacaggatcctgtttcataaaaatgagaactgcggccgaaacggtgagagatcatccagggcttcagttctctttttatttagaaaccgtcaggttatacaggtgcttcttttttcatatttatgttaaagaaataaattgcagaagatctgtaaaaggggaagatatgaaaaaaagaagatggatatgtatgtttctgctgcttcaggttctgtggtgcagtatgactgggatggcagtatatgggatggagccggatattccggtatcagcggttgtttcagggcaggcgcaggcagtttccatacaggcaccttccgctgttttaatggaagcatccacaggaaagctgttgtttgagaaagatgcagacgaaaagcgcagtcctgccagcgtgaccaaggtaatgacactgcttctgatctttgatgctttaaaagcaggcaagatccagatgacggaccaggtgaccaccagtgcatacgcaaagtccatgggcggttcccaggtgtttttagaagaaggagaagtacagaccgtagaaacactgatcaaatgcattgtgatcgcttccggaaatgatgcttctgttgctatggcagaatatatttctgggacagaagaggcttttgtagaagaaatgaacaaacgggcagaggggctgggaatgaccaatacccatttttcggactgctgtggcctgacagaagatccggatcatctgaccacagccagggacattgcccttatgaccagggaactgatcaactgctatcctgagatccataattattccaccatctggatggaaaatatcactcatgtgacgaagcagggaaccaaggaatttggccttgcaaatacaaataagcttctgaaaatggcagcagatttccaggtaaccggtttaaaaacaggttccacctccagggcaaaatactgtctttccgctactgcacaaaaagacgggatccgcctgatcgccgtgatcatggcagcgccggattataaagcacgtttttctgatgccagaaatcttttaagctatggttatgccagatgcaggctttatgaggacaaagaaaaaatacctcttcctgagatgaaagttgcaggaggagtgaaagaaaacgtactgctggaggcagagggaacctttacctggttgagcacagagggggaagatctgggaaagatcgagaaaaaactggaactggcagagcagatggaagcacccttagccaggggggaacgtgccggcatgatcgcttattatatggacggggaaaagctgggagaacttccggttgtgacggcagaagcagtagaaaaggccggatacatagaccagctgcagaaattatttggaaaatgggcgggttttcgcaataaggcagcataaagaagctgttaaaatgcaggaaatgacagggaaaacctttgacgggagcggttttataccattataatacctttcatattatcatgataccagggtcaaaatataatctacccaggcaagaacggtcacgtcagaagacaggaacgtatgcaggtgtgggaaaagtgagtctgggaaacggaaagaggtggaccatgaaccagatcttactgcttacagggatcgtcattgtgatctgtattctgtcaggacggctgatcgataaactgggagttccgtcattacttgcatttatccttctgggaatgtgctttggggtagatggtatttttaaaatatcctttgatgattatcagttcagtgaactgatctgttccgtcagtcttattttcatcatgttttatggtggtttcggaacgaatattaaagaagcggggccggtgatccccagggctgttctgctttcaacagccggtgttttatttacagccgggatcacaggactgtttattcatctggcgttaaaacttcctcttcttgaaagttttttagtggcatctgtgatcggttctacagatgcagcttctgtatttaatatcctcaggtcaaaaaatctgaatctgaaagaaaatacagcctctttactggaaatggagtccggttccaatgaccctgtttcctatatgctgacggtgatccttacagcagtcctcacaggacagtctgtaaatgtaggttccatgctggttttccagatcctgttcggcattggctgtggtgtgttttttggaaaagtcacagcgtttattttaaataaagtggaatttgatattgcccagggaaaaaccattctggtatttgcaacggctatactggcatatacaattccttccatgatcggcggaaatggatatttaagtgtatatctttgcgggatcctgttaggaaattcctaccttcctcacaagcgggatatggtgttgttttttgatgtgcttacaggtgtggcacagatgatgatctttttcctgttaggacttttagtaactccaagccagctgccacaggtgatcattccttcttttgtgatcatgatctttcttaccctggttggccgtcctgtgtctgtagccgcacttttagctggttttcgggcatctatcgggcagatgggactggtgtcctgggcgggacttcggggtgttgcttccattgtttttgcaatctatgtagtgctgcgccaggtccctttaggatataacctgtttaacctggtattttgcattgtactgttgtccatttctatccagggaaccctgcttccatggatctcaggaaagttgcagatgatcgatgaaaatgcagatgtgcgccgtacatttaatgactatcaggaagaagagagcatcagctttgtaaagtttcatctttttagccagcatccttatgtgggaaaatgtttaaaagagatcacattgccgcctaaactgttggttgtggtgctgatccggggaaaagaagtgttagttcccaatggagatacctgtttgcaggcaggagatctgatgatcgcagcggcagaggaatttgaagaccggaaaaatatgacgctccgcgaaataaccgtggataaaaatcataaatggaaaggaagatctttaagccgtatccctatgcaggcgggaactttgatcgttatgatacgaaggggaaaagaaactgtgatccctacaggaaatacagtggtgtatgaaggggatgtgctggtacaggcaaaattttaaagtattatgatcatcaaagtgctatgaaaagggcaggtctcattgacttgctctttttcttatgttatcctagtaccatcggcggggagatctccctgtcagatctgtttattctatttatttttggtcgtttcagaccgcagtttcacaaaaattgtaaaaaagtgaaaaaatgaaaaaggaggggaaagtttggattaaaatatcaggggattttgcaacatttctaaaattcagatcatggaaaagatcaaacatcaaatctaaacacatcacatcaggacaaatcagatcaaacacatcaaaacacattccaaagggggaaaaacaattgaatacgaaaatatggaaacgaatgatggctggcttattggcaggcgtccttatttttacaggaatcccgttttctgcctctgcaggtgaaccgcctgtgcagatgatcatcaggggagatgcctttcagaacaggcagatcaacattttcggccacagtcaccggtcgatcacctgctattatgtaaatccggtggaaggacatgtaccggcattttgcctgcagccgggaaagaaacttcccaatcacacccaggcatcctgggagaggtacagtgcgtcaccggaaacctccgtaccggtcataggaagttttgaccggtatctgcctatgacactggcttatgagtggatggtttcaggaaattattatgataagacccggtatgccatggtgcagacttatttctggggctgtctggcaggttttgagcaggactgggatatccaggaagagaccatgaaaaaactggaatgggctataagagacggaagggttctctccctgtttcatgaaatgaggtcggtagtggaaaagggcctggaagaatatgagtcgaatagcggaagtagtcttcctgcctggaatggccgtaaggaaaatatgatcttaaaagacggtcattatgagctgaccttagatcttagttcctgtccccagcttaaaaacgcaaactggcagttcccggataaaaactggagttttacacagggaccaggggaaaatgagatcacatttctttatacaggagaagaaccttccggacggatcagcgcaggaaacgtggaaggcttggatgaccggtattatgcctatatcttttatccgggagagtcttatcagatgcagatgggctggctggatatgcagcgtccccaggcagaagtatggtttgaaacaggaaaggggagtgtccagggcggtcagatgcagcctttagaacggttccgccacagggaagtttttgaggcagattacaaaatagatctggaaaaatattgtgcagaaacaggacagcctcttgcaggagcggattttcaggtatgggaaagttttgaccattcccagatcaatgaacatggctatgaagaaggggagccggacggaacgacaggtcaggtttacagtaactgtatgtccccggaaccggaagaagaatggctgtgtgacgtgatcaccaccgacgaagaaggaaaggcttttcataaagatatccgcaattacaattacagcaaaacctactgtatgggccatccggcgccggaatggatcgaatgtgatcacgaaggagatggcggtgatggagaagacggggaaggcgaagaggaagaatgtaactgtgaagaagaaaatgaacgtctcagggagcagtggcttgaggaacaggaactgtgtgaagcttccagcgatttccatgtatccaatgaggatgaagaggaccatgaacagagtacagaagcaatggaagccatgttagaggaccgggatgaaacctatgaaaattttattgccctggagtatggctatacattaacagagaaaaaggccagaaccggctatatggtccacgggacacacagggaagattttgaaatcgagaaaataacagtggcttccgcccaggcacagagaaatacagcaggaaaggaaggtacaggaagagaagatccgcaatcagaggtgtatctgggggaaaatacgcagctgcagtttcatcccgctccacaaaaaaaagaaaagaaaaacggatatgcttatgaaaccggagcgcaggaagaaagatcagcagaggaacttagaacgatccatgaagtgaagctgaccgaagatatttatgaagaagaggaagatgacgaggatgagatctgggatgaccgggcaacggaaagtaatgcaaagataagcaggacaacagcaaatacggcaacagaaagcaaagcaaccgcaagtgatgcagcagaagataacgcagttgtagctgctgccactgcatcgaacgcaaagaaggatctggaaacgacagaacaatatatttatacaagagaagaaatttccctggaaccgatttctttatgggagtctttacgggaaaatgtatggaattctgtaaaagcaatctttttttcctcagaagacgatgatgattttgaggggataacagcatttcttcctgattttcaggatgatgatctgggagagatggatgtttcctgttttggcgatccatcgaattccctttactgttttaaagtctgggaccaccgcacagaaggaaggatctatataaataaacgggatctgcatctttatgaaaaggaccaggaagaaagctatggccggacccagggagacggaactttagaaggtgctgtatatggcctttttgcagccgcagacattgtacatccggatggaagatccggtgtgatctaccagaaagatgatctgacagccgtggcagcaacagatcaggatggtaatgcctcattttttgcatacacggaggtcccgcatacagtagtaaaagaagatgggaccattgaggcaccggaaaatttcctggggccggaaaccttatataacggcagtaccattaattcttctgatcatggatttggaagctatacctatccggacagaaaggaagaaaatggaaattcctggatcggaagaccgctgctgatgggaagttattatgtgaaagaactaagccggtcagagggatatgaactgtctgtaacaggaaagaacctggtggagacgaaccgggggtcaggagaagaaaatgtagtgcgaaaggcagggcaggtacaggtaagcgcaggtctgtctgagcataacagtatggaagcagacggttcctggaatgattttacagtagaagcatttggaacagaaaaagggtatgagatcacagtttccggttatccggaaaatacaaagttttaccgtttaagttcacaggagcagagggaaaatttaaaacagatcacaggaatggaaaaaattcccaaaatggatcatttgggaaatcctgtatatgaaaaggcaaaaggcggagaattaaaacgggatcttaatggcaatcctgttttaaaagcagatgcgggggaagacgaaaaagtacctgcatctgagactgtgccctatcatttccggacagccccttatataaaaggagaagcaaaaccggaagatctgtctaaatgggatgaagacctggatcctgattatgtgatggaacaggcacaggcaatgcttatgcagttaggctataaagaagctgacggggaaggggcaccatgggtttctataaatctggattctatgaatggaaaggccgtagaacagatccttgactggtatacagaacacagtttttataatatggccgccgtttctgagataaaggaagaagagggacagtggcaggcaaaacttttttatgactattctggaaatacagaagcaggatctgcagtttatgaccgggcagacggacagctttatgtgaaaaaagaaagggaaaatggtcattactggatctgcattcccaaaggaaaattccgtttaagcagtcataccgcttacataaaagaaaaatgggaatatgtggaagatgagcttaaattaatttatgagcctgtttatgaacggtatgaagaaggagaggttcttttagatccaaacggagtaccgatccaggaaatggaacaggtccccatttttgaagaacgggaaaccacgtatgtgactacgaaagaggagccggtagaggctttctgggatcctgaaaaaagagagtatcatattttggtggaaaatgaaacagactggtccgtggaaaaagaagaggtagaagaaacgttccgtgcagtgaccggacaaaccaccatttctgtaaatggaaaagaggttccttataatcagtatctggtatccatgggagcagctgtggatgtagaagcagaacaggaagaaacagatcctggaagttttgtaaaatatgttcatctggcatatcctggtcagaaccagacagttcaggatggtggaacagaaaaagaaccggttcaggttttggaacgggcgatccggcagccggtacgcattaccaaacacatttcccagtcttcttatgaaaatgtaaatacctacggttctgtgcataatgatccagtcactacctttttaggcttattccgtaaaaatggatctgcagaaggccggaaacttttagatcagttttcattcaggatctacctgaagcaaaatcttttaaacatttatgtggatgatgagggaaagatcctgtcagaagatatcagttcaccagcttataaggagctggtacagactatttatctgccgccggaagatgcagaaaacaggggtcatcagctgatggaaagaaatgaggatggcagctgcaattaccggaaattttttgacgcaatggaaggcgcagaaaagaagaagggcggtatttatcccaaagaggtactgacccagtttgccctggatcattatgatataagatcctataaggaagagatcttaaaagaccggccatatatggacagtgacagggcatacaaacaggctttagaccaggcgagaaaagaagcagcccgttatctggatcagtttacagggttaaaagagcgtctgtctattgaatgggaacgggatgcaaatggcggtacggatggtaacaggaagaccatccagtgtaaccagagaaatggaaaagacgattattatgagtattccattcctctcccgtatggtgaatatgtgatcgaagagcagatgccttctgatctggaaaaagaactggcaaacaggcattataagattgaggaaccaagggagatcacactgccctttgtgccggagatcatacgaaatgaggataccggggaagaaacggttttagatgagatcggcagtgcctattttcgttatcacagtagtgacagtccggatgaactgatccgcaaatacaagatccgctttaatgaagaggaccggaagatcctggcagatggtatagatggttcctttgccatttatccttatgggcttgataaagatattttgccggaatacagtacgggaactatttcacaaagtgaggatcatgtaattttagatggtgtgatctatgacggaagtgaacgggaaaatggccagatggaaatatgtgaccaggttcctggtatgaaggggaaaaatactgccattgagggcaaatttgcgccgatgctggtaccgtggagcatcctgacaccggaatatgaccgaatcaacccggatacgggaaatatagaaaccttacagcctgggggaagcggtgccggatttaattatattgcatttgcccaggaagattttgaaaatacctattttaattcaaggctgcggatcgaaaagatcgacagtgaaacaggggaaaatctgatccatgagggagctttattccgcatttatgctgcaaagcgggatgcacagaaaaacgggataaacagtgtgaccggaaccggacaggtgctgtttggaccggcagaggatgcagaaggaaataaggttgtggacgcagatggaaaggagatcctttatccgagagtggggcaggacaatggttcacaggatgatcttcctgtgaagttagaccaggatggggtccctctttatgatgaaacccagcggatcagccaggtggatgaaaccggcacagagagagggatattccgctcttttactacactgcgggaagtcttgatccatggaaagctggaaaaactccctgtgggatacattgaaacgcccagacctttaggggcaggtgcctatgtcctggtagaagtacaggcaccggaaggttacgtaaaaagccgtccggttgcttttgaagtttatgggaacgaagtatcctattataaggaaaacgtgtacagagacggtacaacagatggatatgaacggaaaacagctgcaaactatgagtatgccattccggtaacgggagatggaaataaaaatgcttacgaaacagtcagccagatcccggtggaaaatcatccttctgtaatgcggatccggaaagtagaggatggcgattccctggttggaaatgaaaatggcctgttaaaaacggatgctttaggccaggaagaaacaagcggcggcctggaagaagatatatgggtaaatgacagaggagatgaaatcatttaccaggtatatggaagaaaggagaagttagaagaaagaggagatgtaagagagatccattttgaccgggaactggggacatggaccgggaaagtaacaaagaaaatggatttctgttcagaagagatcatagaaggtacagaaaaagaactaaaagcaatggaaggagtaaaactcctttatgaccggaagggggaatttacaggaaaagggatccgttttaaagtaacggtctcaggagcaacactggctttataccagggactctggatggaaaaagaagaggacggaagttataagggagtaacagctgaagttcaggatggtaaaaccataaagatcactgcttctgaaacaggaagcaggcggcagatcctggagacaggaaaagatgccggtcctgccgggcttgctatatggcaggatgagaaggtggaaaaccagccggaagatctgtatttttatgatctggaccagttaaacgaagaagggcgcctggagaggacagaggacaagtctgtatacaaagtattagatgaacggggaaacttcatctgttatgcagacgtaaaaacaggaatggcctttgtatacgatgatcatgaacggatcatggcttacattgcagatgaaacgggagaaaagaagctggtttattctgtccaggtctataaggacaagaatggggagtctgtttataaggaaaaacgttctgtagatgatgaaaatggtctgcctgtttacgataaacaggggcatttcacaacaaaggaggaacgctggaccagtgacaacagcacagactccaaaggggaagcagagcgaagaggcggccttcatgagattaagcgcctgccttttggggcctatatccttcaggaagaacaggttccgtttgaacagggctatgtgcaggcaccttatcagggaattctttttaaagacagcatagagcctcaggaatatttccattccaatgcctttacaagggcagctttcgccaaggtagacacccgtacacaggaagagatcaaaggggctgtgatgacgttttatgaggctgcgacagatgaagcgggaaggatattaacagatgaagacggaatttatctgcctggaaagaaatatgcttcctgggtcagcggttatgcctgtgacgatcaaggcaatgtgaaaacagatgaggaaggaaaccggatcgaaacaaaaaaacctcactggatcgatcatattccggtaggggagtatgtattagaagaaacagagtgcccgtatctgcagggctatgtgcagagaaaacggcagaatatccagattttggaaacagaacatgtacagtcttttactatggaagatgattttacagctgcagagatccgcaaggaggatggaaagacgggagaacttctctatgaagacagtctggcaaaactggtcctttaccaggtgccggaaggagaagaagataagccgttagcggatcttatgggagaagataataagttgttagactttgaacgggccggttttaaagaatggatggaaatatgggctacaggaagagaagaagcagacgctgccggcttaaatcccattgcaaaatacgatcatcggtgggagaatgtgccgggtacgcttaaaggcaggtattgctttacagaagaaggaacggtacggtttgaatatcttcctgtgggatcttacattcttgcagaaaaagaaacgccttccggttatgccacagcggatccaattttatttgagatcacagataccggtcatttggaaaaaatccatcaggtggttatgaaagatgaacctttgagtcttgtggtcagcaagaatacgattaccggaggaaaagaagtagcaggagcaaagctgggaatctatccggtggatgaagagggcacagtcagcgaaaagccgctgcttttgcatattccggaggaagaagggcgttacagggatgaggaagccatatggttttccggaactgatggagtgtatacagaagaagagaatgaaaatggggaattgccagaaggatttgaagtgggagatctgaaaccacatctgatcgaatacattcctgttggttcttatattttaagagaagaaatgacgccttatggatttttacagtctgtggatatcccatttgtaatagaagataccagagagatccagaaaaaggagatgcaggatgaaataccagaaggcgggctgacggtgatcaaacatgatgcagatgatgcagatcaggttttagagggagcagaatttgaactctttaaccagaccttagacatatcctgtgaaaagcaagtaacggatgaaaaaggaaaagctcagttttcttcccagcccatcggatatctggaccaggaaggaaaattcagcccgtatgattatcttgtaaaggaaacaaaagcagcgccgggacatatgctttctgaaaaaacgctggaattccagtttgaatataaagatgaaaaaacacctttgatagagcttacttatgacccggtaaatgacagcaaccgtgtactggtgaaaaagcttttaagggatacagaagagtatctggaaggtgctgttttgagactggaacgggaagaaaaggtaattttggaaccggatgaaagaggtgatcagggcgaaagtcagaagaaagatcagaaaaaatatcaggcgaaagatcagatgaaagaggagaagacctgggtagtagtagaaacatggatcacaggaaagcagtctcatctgatcaaaggccttgcagccggggattacagactggtggaagaaaaggcaccgactggatttacgaaatcagaagaaccggtgtattttaccattacagatggaatgacagagataccggagatcacactgcgcaattatggcaccattatatccgtagaaaaaagagaagccagttcagaaaaacttctttccggcgcaaagctggaactggtgtgcaaggacaccatggaagtgatcagccaatggatatcagaccaggaaaatggtcaggtatttaacggtctggaaccgggaacttatatcatcagggaaatagaagcaccggccggatatgagaagggcaaagaaatggagatccggatcttagaccaggcagaaacagtgcaggagtttgttttctataacagccggatccgttcatctggcggaggcggaagtcatacagtgccaaagaaactgtatatttcctttaaaaagacagatgaaaagggagaacctcttgcaggagctgtgtttgcattttatgaccagacaggacgattggcaaagatagcagaaagtggcccagatggaatgttcaagatcatttgcccgccaaatggaacttatattttcaaagagataaaagcaccggatggttatgaactgagtcaggaactgtatcattttacagtagaaaaggatcagaatgtaaaaggtgtatttcagatcaaaaatgaaaagatacagaaaaagacaaaaggaaggatccaggctttttaccaggtaaaaggaagaaatgggaactttaagggcttaaatggaaaatattccggcagcagtgttaagacaggagacaacagtcagattggatggatcctgttggtgacatgtgtgtgtctggcaggtgctggctggtgtttttctgatagcagccgaaaaagaaaaaagatggttttgtttctgggacttgtgatgggggcagtgagcctgtttgcattcagtgcaatggcccaggaacaggatgcaagtctctatgatgaaagcttttatgcatcccaggagatcatttacaaaaagatggaaggagtggatacagtaccggagactgcctgggtccaggtaaaggaccggacaacgggaagaaaaacaaagcggatcctgcctttagaacagttcagccgttttaatgaacactgggaagatgggctggagatcacgatagaacaggaaaaggaatttcagaatgagataacagaagcagaaatattagacgaagcgggtttacccgcttcggactatgagatcacacagatcgagaaaggagaagatagaaaactggttgccaggggcagaaaaaaggtatttgactgcagggcagtatacagtgggctgatcgcagagaaagattgggacagggaagaaatgccggatacggatctgaaaagagaatgggaacaggatgtagaattaaaaccagctgtcacaggatcaaagtttgtaggaaaaatggttctggcagtggtaaccggcagctgtgtcggtattggcgcctactggatcctgaaaaagggaaagttaaataaagcaagtttaaagatcagggaaaagcgccggatcttagggataattcttttgacaggagctgcagccggaatagtctataccggaaatacagtaagaaagtatcgtctggctgccgaaaaatacgaaagtatccgcagggaggtacagaaaacagaaacttcttatgctcaggatcattctggtacgtctatagatgaaataacaatagaggaagcaaagttaaaagagatcaatccggattataattgctggatccgtattccgggaacgtccattgattatccagctgtctggggaaaagatgacaaatattatttagatcatgggtttaacggggaaaagcagtcaggaggaacaatctttgcggacagccagaacattccttttgtatcagccaataccattttttatggacataacatgaaggatggttctatgtttggtgatctgaaaaaatacagggatcccggatttttaaaggaacatcccaatgtagagatcttttatcaggggcaatggatcacctgccccattatcctggcaaaagtaacagatgagacagatggaacaccttatcaaaaaggagaaagaaagatactgaccttatccacctgctatggaaccagtaaacggatgatccttcaggcacttattccggttgcggggggaatgaattgacaagaaatttgctggacagtataattaaattagttagatatacgtagctgaaaatggaaaagaaagcatgggtgagaaatgaagataagtggggcacataaggcgatgaagcgggtgctgatctttcttgttactttgggaattattgttccgatcctttttacagccgggcagatggggcttttttcaccagagcctacagtagaaatagaggctggtattacaagtgaatcagcgccggttttgcggatcgcaacagattatgatttctgtccaaattcctattacaataaggatggggaattatcaggtctttatgttgagatcatgatagaggtggcaaaccgcttgggaatgcgtccggagtttaaaacggctgactggatgggctgccggaaaatgcttactgaggacgaagtagatgttttgacgggactggaaatattttccaatatggaagggactttaaggacgatccctttctgttcggatgaactgcgtgtatatggcagaagcaggatcgacagtgcggctgcccttgcaggtaagaaggttgcgttaatggcgcgttctgtgatcgcaaccacctatgatctgcagtgtgattatctggaatacagcaccaatacggaaatattggaggcagtagagcagggagaagcagatttcgggatctgtcacggtgcagttgccacaaagatcattgaaaaaaatcatctgcatctggtgccaagccttgtgatcacaaagagttatccggctttagcagttcatgatacacagccaaaactgcagcgcatgatcaatgaagtggtccgggatatgtctgaagacggaactattggaaggctgcaaaataaatggatcacggaatttgccagaaacaggtccttagaatatgtattccaccaaaatgaagtattttatattacatttatactggggatcatcattgtactgtgtattacagccggttactgggaagtagatagacgtcaggaaaaatatatccgcaccctattggaatatcaggaaaaactgcagcagtccaatgaagagacgaaacgggccaatcaggccaaaagtgagtttctctcccatatgtcccacgatatccgcacaccgatcaacgggatcatgggtatggtggagatcatcaagaaaaatctggatgatccggagcggatcaaagactgtctggaaaagatcgataaagcatcgcatcatctgctgtccctgatcaatgatgttttggatatgagcaagatcggaagcgggaaggtccatctggaagaaataccggtggatctggatgaggagatggaaaagatccatgcgattgcagatgtacaggcgaagaagcaggaaataaggttttctattgaggatgaagttgtccacagacagtttcttggcagtccggcccatttgagaaggatccttttaaatttgatcagcaatgccctgcgttataataaaaaagggggaaagatctgtctggccatccgggaagtggaatatgacggatcccatatcggtctggagtttaaggttcaggatacgggaattggtatgagccgggaatttgtggaaaaaagcctgtttaagccatttacacaggaagatgaccgtgtaaggaccgaatatcggggaaccggtcttgggatgtccattgtttatgaactggtaaagcagatgaacggtacgatcgatgtaaacagcaaaccgggggaaggtacaacatttacagtaaagttggcatttaagacagtggactctgcatggaaaaagaaggaaatacagggagaaaacaggaatattaccgggatgaacatactggctgcagaagataaccagttaaatatggagatccttcagttcctgttagaagaagccggagcgaaagtaacggcagtatcagacggaaaacaggcagtagaatattttgcggatgcagcatcaggcacctatgatgtgatcctgatggatattatgatgccagtcatggacggtcttgaagcgtcaaaaaagatccgtgaactgccggagggcaagggaaaagacattccgatcatagcgatgacggccaatgcatttgtagaagataaggaaaagacaaaagaggcgggaatgaatgcccatctgacaaagcctgtaaacagggaagagatcatccgggttctggcagcatattggaaaaataaaggttaacgagtacatgagagagttttggaagaagaccatccaggtcctgctgtatggaggtctggaaaaagaacagtataagagaatctctgctgagatcaacgaggcgaacagaaaaagcattgtggtgctgtcaacacaccaataagatcatatttatgggagccatccttttatttggaatgttggcatttgtaaatttcaggatcagaaacaatccgtttctgatccatgtttgcgcctgtatgtttatggcattttatctgggggtgggtatccttgcagccatcggagaaggaagcattcaggaacggacgggctcaggaaatacaaaaattaaatgaagaactggctgccagccaggaaaaacttcaggctgctttagtggctgctgaaaaggccagccgggcgaaaaccacatttttaagtaatatgagccacgacatccggactcctatgaatgccattgtcggacttaccactcttctggaacatgagatccatgagccggaaaaactgcagctccacatccagaagatccaaaattccagtcagcatctgctgggacttatcaatgacattctggatatgagcaagatcgaatccagtgaggtgaaattaaatgaagatcccgttgatctgatggagcaggtggcacagatagacagtatcatctgtccacaggcagaagaacggggacaggagtttaagatccatgttcacgggatcgatcatggacatcttctgggagactctgtgcgcctgcgccagatctttatcaatctgctgtccaatgctgttaaatatacacctgttgggggaagcgttatcctggatctgacagaagagccaagcagtataccggaacatgccaatatatccattacagttacagataccggatatggaatgacgccggagtttataaaaacgatctttgaaccttttaccagagcagaaaattccacgaccaacaaaatacagggaacaggactgggtatggccatcacgaaaagtatcgttgacctgatgggcggcaggatacaggtgaaaagcgagttaaataaaggaagctgttttgaagtggtacttccttttgcaatagatcccaatggttcacaggaaaaaaatggaaaatatctgcatcaggaaggtgaaaaagtttccgtattaaaaggaatgaaatttctttgcgcagaagataatgaactgaatgcggagatcttagaagcgattttggaaatgtaccaggcatcctgcaagatctgcccagacggtgaaaaactggttgaagcctttgaaacttctgctttcggagattatgatgctattttaatggacgtacagatgccaaatatgaatggcctggaagcaacgaaaaggatccgtaatggcaaaaatcctctgggcaggaccattcccattattgctatgacagccaatgcattcaattcagatgtacaggaatgtttagatgccggtatggatgcacatgtgtccaagccgttggatataggaaaaataataaatagttttaaattccctataaatttatctttaaaaactagatatgaaataggtaaaaatgtgatagaagagaaaataattgatccttctgtagaatataaaattcaaaaggtgcaagatgatgataatgtataaaatgtaaaatttaaaagtatttccattatatttggaaaaatatgtttaattacatatttagaaaaactagtaggagtatttgccatttctgtagatttcaaaaatacagaaaatatttctgatcggtccttttaggctgttccagcatatgataaattatgaggacaatggaagatatccccataaatattgctggaaagagaggaagaggatatggattttgggattgcaggtgtggcggcgatcacggtgatctgctatttaggcggaatggcgtgtaagacgacggaaaaagtaaaggatgaggtgataccggtagtctgtggcgtaaccggcggaattctgggggttgcaggcatgtatctgataccggagtttccggctggtgatgtgatcaacgcagcagctattggtatcgtttccgggcttgcttcaacgggagtacaccaggtgatcaagcaggtggggaaaaaataagggaggtaccgtgtatatgagagatattgcattgtgccacccgcggatgcagaagatagcagctcagtggatcaccgcctgcaaggcagaaggaattaatgttgctatttctgaaacactgcgtactgcagcagaacaggatgctctctatgccaaaggccgtacaaaaccgggaaatatcgtaaccaatgcaaaaggcagttcctaccggtcacagcaccagtgggggattgcctttgatttttatctgaaaatggatgtggatggagatgggaagatagcagatgacgcttataatgacagcaaaggtcatttcaggaaggctgctgaaattggcaagaaacttggtcttgcctggggcggagactggtccagcattgtagataagccccatttgtatctgcctgactggggaagtacgcccactccattaatcaaacagtacaaaacaccggaaaagtttatgaaaacatggataatggaaccagtgaaaatgggatggcagaaggagaatggcggctggagattttatctgaaagatggttcggaaaattatgttgttaatgattggtataaagatggcgatctctggtactggtttgatggcaatggaataatggtccataacgtgtggtatcagtataagggacattggtattatctgggaagggatggcgctatggtgaaaggactgcagaccatcagcgggaaatggtattatttggatgaagacggccggatggcaacggaaccggtggtgcttacgccgcagaaggatggggcgctgcagtatccaaagctgacagaatagaaccatatgcaagatgaaatgtaatacaagttaaattggaaaaagaaaaaaccgcgtgtttgcgcggtttttttagtggagctgaggggaatcgaacccctgtccgaaaatcaattccctgttcttctactatcatagttccttatttgacattccctctaccgtccgggaagaaacactctgacggttttagtagcttcataatacgcccgcatgcgcaaagctttgcatgtgtcgtttcctacatagtcgatgccagggtcttaaagtgtaggtgccttaagtctgacagctgccattaggcagcgtatgctaattcgtcgttagcgtttatttttaattttgccatttaacccatcgcatggggatagcttcaccagctgcatgacccccgtcgaaaccagtacaacccctgaatggaatactcagtttttgtttatctggtaggccaacgaagaaatgctactcttagtatcatatcattttcattcttttatgtcaatacagcagaggggagaattgtctgcattttgtgtaagataatgtgccatttatttgtcaggtatttgtaataaacaggcaaatcattattaagagaaaagaaaacaaaaataatcttaatctgctagaatagaattataaaagaggtcagcagatgtcctctaaaggagaagaaaacagtaaaaggaggaaacgtattatgaagaaaacttacagaaacatggcgctggcggcagcttgtgttttaacggcaacaggactttggggatgcagcaccagtgtgcagatcccggatactgtaaaggtgcagcagggagatagcagtgacaaccgtattacagtaagcggtatggaagaagtaaaggcagtgccggatatggcccagatccagtatagtgtatacacacaggcagcgacagcccaggaatgccaggaagaaaatgcgaaaaatgtaaatcagaccctggagactttaaaaggtctgggagtggaagagaagtccatccagacatcggattatggtttgagtcctatttacgattggaattccggacgccagaagattacaggttatcagatgagtaccagcatcacagtttcagatatcccggtagaaaacgcaggaaagatcattacagcttctgtagcttccggtgtcaatgaactggacagtgttcagtatctttgcagtgactatgatgaaaaatatcaggaagcattgaaaatggctgtagaaatggcaaagaacaaggcagatgccatggcagaggctgcaggaatgacggttgtaaaggcagtaaatatatcggaagatggttattatcctcaggcgagatacaatacagcaggtgcttctgccaagcagatgatgatggaggatgctgctgcagatatgggcgttatgccgggagaagtgtccatagaagcccaggtaagcgtaacttttgagatggaatagaatgagtgcgttagcgcgtgtttgtgagtcaatagatacacaaattaaaagagggatgtcacccggcttaaaaagccgtcaggtgacatccctcttttgaggatagaaaagagaccagattaataatgaaacattttaaacattctgaacatcattaattggcttttttatctcttggaagtgttacattcaggataatagctactaatgtagcaataactaccggagattttccgaaaatagttgttacccatgcagggaatgcggaaagggacgcagacgcctgagaaacacccataccaagagctgctgcaagacctacgatagaggtattgcggtagttcatatcttctgtcataaccagtttcataccggtcatggcgatggatgcgaatacggaaacggttgcaccgcccagtactgcatatggaatagttgttaaaagagcagagaatttaggaaatacacctgcaataaagatgatcacagctgcaagaccaagagttactctgtttacaacttttgtagtagcaacgataccaacgttctggctgtaagttgcagtaggaagacatcctaaacatgcgccgaccatattggaaacgccgtatccaaggatagcaccctgaagctcatttgtagttggttcacggtctaaaccgccggaagtagtagcggagaagtcaccgatagcctgtacagagttgatgacaaacagcagtcctaaggcgatacatgcagatggttcaaaagtaatgccgaaatgcaggacctgaggaagctggaacacaccagcctgagctacgttggagaaacttaccataccaaagaagctggaaaagatatatccgatgatcataccaatcaggatagatgccagttttaaaaatccttttgcaaaatgatttaaaccagtaacaactaccagagtaaagatagcgaccagccagttctgccaggaaccataagtagcgcttcctgtacctcccgccatatagttgatagcagttgggtaaagggaaaggccgatggtgaaaactacggtaccggcgattaaaggtgggaagaacttacggatctttttgatcgtcagtcctacaaggatagcacagacaccgcctacgatttgggcgcccaggatagccgggatgccgccttgatcagcaatggcctgcatacttggcacataggcgaaacttacaccgatgataacgggaagtccggcacctaagtgaaaacctgtcttctttccgattgggaagagctgcaggagagtagcaagtgcagacacaactaaagatgcctgtatcagcagtacacggtctgcggtttcaagaccggctgcaccggaaatgatgatggcaggtgtaacgcagcctacgatcattgccacaacgtgctgtaatgccagaggaaatgcctggcttaatttcggcacgccgtctaattcaaataaagatccttctttactggttgtattcatatgcaatgccccctttatttacgctaaatggatatgggtaccggtcttgccctggataccgtcttttgctttctccaacagcgtaatgagcgcagtgcgtcctggttttgattcagcaaatttaacagcagcctgaacttttggaagcatagagccaggagcgaaatgtccttctttgatgtactttctagcttcttcggtttcaaggtcatccagccatttttcttccggctttccgaagttaatagcaactttttcaacagcagtgaggatgataaggaaatctgcatccagattttcagctaacagctcacttgcaaagtctttatcgataacagcgcttgcgccctttaagtggttgccctgtcttgtaacaggaataccgccgccgccgcaggcaattactaactgaccggagtcaactaaggaacggatcgcgccgatctcaacgatctcagctggctttggagaagcaacaacacgacggtagcctcttccggagtcttctttcatgatatatccgtacttttcttcagcaatcttagcctgttcttctgtcatgaagtgaccgattggcttggatggagcgtcaaaagcaggatcatctgcgtctacacgtacctgagtgatcatggtagcaaccgggatatcatagatattgcggttgtaaagctcttctcttaaagcattctgtaagtcatagccgatatatgcctggctcattgcaacacagacagaaagaggagtgttaggctggtttgcatcttcacggcttaatgcagccatagcgttgttgatcataccaacctgcggaccgtttccgtgagctacgatcacttcgcagccttcctcgatcaggtctacgatagccttagcggtgatcttcactgccttcatctgctcaggaagagtatttcctaaagcattgccgcccagagcaatgacgatacgttttttcttcttgttttccattgttaattaccccttttttcgataaaaagagccaccggtagcccgagtgcgtctgacagaaagccatttacgacgcgctccggtccggcagctcagaaacacctatcttttaactagattttatttgaatactcttggagttcctttttcttccagtttctttaagatctcagcaggatcagcaaacttagccagcatgatcatagctgcgataacgtatggcttgtagcttgcttctttgtacagaggatcacggtaacgatcgaatacagaagcctcaacctcgccgtccttgcagcttacgccgttgatatcagctggtaagcagtgcaggtacagagcctttccgtccttggttgtcttcatcagctcttctgtacagcaccagtctttgtgctctgcgttctgagctaacagttctttctcaagagccttgatgccatcggtatcgccttcagcatacaggttggttctcttttccatagctgcaaatggagcccagctctttggataaacgatatcagcatccttgaatgcgtcagccatgtcatgagatacacggaaggaaccgccggacttctcagcgttctttctggcaacttcttcaacttctggcattacttcgtagccttctggatgagccagaacaacttccatacccatacgtgtcatcagaccgataacgccctgaggaacggataatggcttgccgtaagatggagagtaagcccatgtcatagccagctttttgccctttaagttctctacgccgccgaattcatggatgatgtgcaacatatcagccatacactgggtaggatggtcgatatcacactgtaagtttactaaggttggcttctgctccaggataccatctttgtaaccctgggttacagaatcaacaacctcatgcatgtaagcgttgcccttgccgatgtacatatcatcgcggataccgataacgtcagccatgaaagagatcatgttagctgtttcacgtacagtctcgccatgggcaacctgagacttgccttcgtccagatcctgaacttccagaccaagcagattacatgcagaagcaaaagagaaacgggtacgggtagaattatcgcggaataaggaaatacccagaccgctctcaaatacttttgtagaaatattgttctctctcatgtaacggagagcatcagcaacagtccagacagcttccagctcgtcgtctgtcttctcccaggtcaggaagaaatcgccttcgtacatttctttgaagtttaatgctttcagcttgtcaatgtaatcctgtaatgttttcatgattcaattctccttttatatgtaggtttatggaatttaaagaatttcttgatggaagcgcagccccgaagggccacgcagactggctaaaataattgattacttgcagtaaacagttggaagagctgcatatacagctgcacaggttaccagatcctgtttccaggtcttctcgttcggagcatgagcctgagcctcagcgcctggtccaaagccgatgcaagggattccgttacgtcccatgatggatacgccgttggtagagaaggtccacttgtcagtcagaggacgagcggttctcatagccagagtttcctcagcaccgatacgctcttcaccgtacaggttgtggtaagcttcttccagagccttggttacatcatgatccttcgggattacccatgttgggaagtagcactcgattggatataccagatcagtgtaggaaggacgattgtattcgtacatggaaaccttaacgtcatcgccgtacttcttaacagccggaagggcacggatctcgtctaagcagctttcccatgtttctccggcggtcatacgacggtcaagagatactgcacaggagtcagcaactgcacaacggcttggggaggtgaagaagatctcggatacagttacagtaccacgtccaaggaagttagcctcttcccattctggattgtatttcttgtctaacatcttaacaaggcccttaacttccttgtcatcagctgcgtcgttctcgttcagagcacgaacgtcctgaaggatgtcagccatcttgtagatagcgttgtcaccacgctctggagcggaaccatggcaggaaacgcccttaacgtcgatacggatttccatacgtcctctctgtccacggtagataccaccatcagttggctctgtggaaactacgaattcaggacgaactttgtcttcgttgatgatatactgccagcacagaccgtcacagtcttcttcctgaacagtaccggttactaatacagtgtacttgtcagacagcatgcctaagtctttcatgatcttagcgccgtaaacagcagatacgataccgccacactggtcagatacgccacggccgccgatctcggtctcgttctcatatccctcgtatggatcgaagttccagttatttctattaccaatacctacagtatcgatatgagcatcaaatgcgatcagggtttttccggttcccatatagccaagtacgttgcccattgggtcgatctcaactttggtgaagtctaactttctcatttcttctgcgatgcgggtgatgtgagccttctcgtcacagctctcacctgggttcttaacgatctcacgtaagaacttagtcatatctttctgataattctgagctgcttctttgatttttgcgtaatccagattcattttaaatatcctcctcttgttttgcaattacttttgatggttaatagttatttgtcaaggcctttccatacaatgttcttgtagcgatcaggatcggtatcgccctctgtagagaagagcagtactttggagttttcatccaggccaatgtcatttcttaaatctttgtattcgtccatggtcatcatagctgctaatgcaccgaatggagcagcaccggactcaccggaggtgatcggagcatcgcccttaacaggagcagctaacatacgcataccatttgcagcaacccagtcaggagcagcaatgaatacttttacatggttctttaagatgtcccaggaaatggtgttcggttcaccacatgcaagacctgccatgatggtctgcatatcgccgtctacaatgcggatgtctccatcaccggcagcagcacccttgtaaagacatgcagcagcttcagcctcaacaactacgaatgtaggtaagttgtcagcatacagattggagaagtaaccaacaactgcaccagctaaggaaccaacgcctgcctgtacgaagatgtgggtaggacgctcacatccctgagcttttaactgttcaccagcttccattgccatggtgccgtatccctgcatgatccatgc

SEQ ID NO: 3629 - DNA, 40148 bp, Unknown
  gut microbiota DNA sequence
tctgagtagttcccttaggcatatgaacaactgccttctgtccaagacggttagcagcccatgcaacaccgcggccgtggttgccgtctgttgctgtaaagaaagtagcctgtccgaattcttttcttaactgttcggaagtaagtacggaataaggaagttcagaaacatcctttccggtttcttttgcgatgtaacgagccattgcaaaagatccgcccagtaccttaaatgcgttcagaccaaaacggtaagactcatcctttacatatacttccttaactcctaaataggaagccatgtgaggcagcttggttaatggtgtttcgctgtactgaggaaagctctcgtggaaagtacgtgcctttttgatctcctcaagtcccataattggaaggtttttgtcatctgttttaggcattttgtttactgcccacagaatcttctgatccatgttactgtatcctccttaaaatttttggttcttaaaaatttttagttcttaagatgatttacgactgtttacgtcgatgtaactgtacagagtaaatttggaaattccaaaatacttggagactttgtctcctgattttgttatgagaaaagcgcctgcgtcattcaaaaactggatggcggttactttttcttccttattcataagagctgccggttttccaatcagagctacggactgttcgatcaggttgtccagaagatcatttacattgtgtacgatctgttctggctgctgtctggtatcacttggatcttctgtactgatgagagctttaatggatctctcaatggtcatcagaccggtgatatcgtagttgatggaaaaaatgtaatccacagcggaatcctctgggtttctgataaaaaacgtactggattttaagatcttaccgtttgatgtgcgggtaagataaccaagatggtctttcagtgaagccggatccctatgcagggtttccagaactaccttagatggtccgtcgccttcacgccggttggtgatatgtccgttgttgatgtgtacaacagagtgttccaggtcgtggcgctttaagtcgtggatcacaatttcgcagtctggtccgaactgtcttgcaaggccgtctgcaatctgttcaagcaagctaagtgtgtatgccatgaacaacctcctcatttcggactttcataatatgatatggtaactttgtacaataaacaatctgcaaaacatttttgcgttgtttatgattacataatagcacaaataaaacagattgcaatagttttttacaaaaaaattttgaataactaaaaaaaattgtatttttcccttgcaaatggtatttcaaggtgttaatataagagtacgacaacattgttattatataggaaaaggagagagccatatgttgatcattggaaacggacgtctggttacaagagatgccggacagccatttttcgaaaatggagcagtagcaattgacggaactactattaagaaagtaggaactctggaagagatcaaaaaggagtttccggaagctgagtttgtagacgctaaggggggcgttatcatgccggctttcattaatacacatgagcatatctacagtgcaatggcaagaggcttaagcattaaaggatatgatcctcacggatttttagatatcttagacggattatggtggaccatcgaccgccatctgaccaatgagcagacccgtcagagcgcaagagttactttcatcgacagtatcaagaacggtgttaccactgtatttgaccatcatgcaagctttggccagatcaaggacagcctgtttgccatcgaagatgctgcaaaagaatttggtgtaagagcctgtctgtgttatgaagtatctgaccgtgacggtatggacaagtccagagaagctgtattagagaatgcaagatggatcaagcatgcattagcagatgatacagatatgtttgctggtatgatgggtatgcatgcacagtttaccatttcagatgagacaatggaatttgctgcagcaaacaaaccagatgaagttggatatcatatccatgttgcagaaggtatcgaagatcttcatgactgcttacataaatatggaaagcgcattgtagaccgtttatacgactgcaatatcttaggaagcaagactttacttggccactgcatctatgtaaacccacatgagatggaactgatcaaggcaactgatactatggtagtacacaaccctgagtctaacatgggtaatgcctgcggatgccctccaaccatggagatcgttcacagaggtatcttgacaggtcttggaacagatggttatacacaggatgttctggagtcttataaggtagcaaatgtacttcacaagcatcatctgtgtgacgcaaatgcagcatggggcgaagttcctcagatgctctttgaaggaaatgctaagatcgcaaaccgctacttcaagaagcagttaggcgtattaaaagaaggcgcagcagcagatgtgatcgttacagattatgtaccgagaacacctatggatgcttctaatatcaacagccacatcttattcggtatgaccggacgcagcgttgttaccacagtctgcaacggtaaagtcttaatgaaagacagagagctgatcggaattgatgaagagaaggttctttacgaagtaagagaagaggctaaaaagctggaacgttccattaacggttaataatgtaaatgttacagttcaaccatgccatcttcttgtttccatattcatgaaaacaagaggcttggtggatccaccatatgctgatttgaacaagaaagtgtttatgcaagcgaacttgcaacacgctttctcattcaaatcagcgcatggttgaactgatgtaaattaattagtaatagccgattacagggcggcgggaaaacagcacaccggaatatccgggcggctgagccgttgaaagataaaaactggcttctgcaaagatacaaaaattttgcagaagcccccctacggtgctgggacctgatcgggtgctatatataaggaggaaatagaatatgagcgatattatgacacccattccctttggaaaaatgatgaactggatcctggaggaacacaagaaaggcgcgatcttcggcatcagaagaccttttgttgcagatcagagcaagaaatatgagatctttggacgtacattagagacacctttcggacctgctgcaggaccacacacccagctgacccagaatattgtagctgcttatgtggcaggaagccgcttctttgaattaaagacagttcagaagttagatggtgaagaccttccggtagcaaagccatgtatcaaggctgatgatgagtgctacaactgtgaatggtccactgagctttatgtgccacaggcatatgatgagtacgtgaaagcatggtttgcctgtaaggtattagctaaggaatatggccttggctctatggacggcttccagtttaatatgtccgttggttatgacctggacggcatcaaactggaaaaggtagaccgttttattgaaggaatgaaggatgcttctgcagcacctatttttaatgagtgccgtcagtggctgttagataacctggatcgttttgataacctgacaaaagaggatgttgaaagtatctcccctgaaatctgcaactgtgcaactctctccactctgcacggatgtcctccacaggagatcgagcgtatcgcaagctatctgctcactgagaagaaagtacatacctttatcaagtgcaatccaactctgttaggatatgagtatgcaagaaaattaatggatgacatgggctatgattatgtagcgttcggtgacttccatttcagagatgaccttcagtacacagatgcagttccaatgttacagagactgcagaagctggcagataagaagggactggaatttggtgttaagatcacaaataccttccctgttgatgtaaaacagaatgaacttccaagtgaagaaatgtacatgtccggtaagtctttatacgctctgtccatgtctgttgcacagaaactggcaaaagactttgacggaaaactgcgtatttcctactccggcggtgctgattactttaatatcacaaagatcgtagacgctggtatctggcctgtaaccatggcaactaccatgttaaagccaggcggctatgaaagattagagcagatcggacagttatttaaggcaaaagaagcagcagctttcgctggcgtaagcgcagagaaggtagaagctatggtagaggctgcaaagtctgacaaacaccatgtaaaggctgttaagccgcttccatccagaaaggtgaaaaagccggttccgttaacagactgctttatcgctccatgtcaggaaggatgcccgatccatcaggatatcacccgttacatgcagttggcaggtgaaggaaagtacgaagaagcattaaaggttatcttaaacaagaacccgcttccatttatcaccggtaccatctgtgcgcacaactgtatgagcaaatgtaccagaaacttctacgaggcttctgtagatatccgcagaaccaagttagagtctgcacagggcggaattgatgctgttatggcagcattaaaggcacctgcagttacttctgataagaaggcagctgtagtaggcggcggccctgctggtctggcagctgcatacttccttgcaaagggcggtatgaaggttactgtatttgagaaggcagaaaagatgggcggcgttgtacgcaatgtgatcccaggcttccgtatttcccacgaagcaatcgatcatgacgttgagctggttcgtgctatgggtgcagagctggtaaacggcaaagagatcacttctgttgatgaattaaagaaagaatatgactacgttgtactggcagttggtgcttctgaaccaggcagactgagactggaagctggcgagaccatgaacgcattagagttcctggcacagtttaaggcaactgacggcaaggtagatttaggcaagaacgttgttgttatcggtggcggtaacacagctatggatactgcaagagctgcaaagcgcaatgcaggcgtagaaaaggtatccctggtttacagaagaaccaagagatatatgccagctgatgaagaagagttagtaatggcaattgatgacggcgtagagtttgcagagctgttagcacctgttaaactggaaaatggcgaactgatctgccgcaagatgcagttaggtgattacgatgcaagcggaagaagaagcgttgttgagactgaggagatcgttaagatcgctgctgacactgtgatcgcagctgttggtgagaaggttccaggcgcattctacgaagcaaatggtatcgctgtagacgaaaagaagcgtccagttgttgaccacaacactctggagacctctgtaaagggcgtttatgttgccggcgatggtctctttggaccagctactgttgtagaaggcatcagagatggtaagaaagcagcagaagctattatcggaagagatttatctgaggatatcttcaagatggctgatgctgaggttgtttacggacgtaagggcaaactgtctgaggagaatgaagagtctgacagcagaagatgtctctcctgcaacagcatctgcgaaaactgcgtagaggtatgcccgaacagagcaaacgtaaccttaacagtacctggcatggacaaacatcaggtgatccatgtagattatatgtgtaatgaatgtggcaactgccgcagcttctgcccatgggacagcgctccatatcttgacaagtttaccttatttgcaaatgaagcagatatggaaaacagcaagaaccagggcttcacggttcttgatgcagcagcaggaatctgcaaggtacgtttagcaggcaatgtaattgattacacagttggaactgcaaatgagaatgttccggatggaattcagaagatcattaagactgtaatttctgattacagctatctgctgatcggttaattttataaaagaaaaaaacttcggggcgtggctttttggtcatgccctagaggttttttcacaagccattaatgaagatcccgcctgcgtaagcaggcagtgaagcatgtcagcatgtgtacgtgtggatctgagcgagagaggaagataacatgcccagagaaaagacaatgaaggtggtatttgcatttccaactaccacaatggcaatgaaaatggaagcagctgcaaaagcaaaagaggctccgggacgtctgatcccggttccaaggcagatcagcgcaggctgtggaatggcctggtgcgcaccggttgcggacagagtttctctggagcagctgatcgctacggaacagatcgtaacagagggctgctatgagctgttattataaaggaggctggataatatgagacagatcattaaaaacggaactatagtcacaggaagcggaagttttcctgcagatatcctcattgatggggaaaagatcgcggctacaggtacagctgaagagattaaaaaactggcacagccgggagataaggagatcgatgcatctggatgcctgattttccctggatttattgatgcacatacccatttcgacctgcatgtggcaggaactgtaacagcagatgattttgctaccggtacaaaggctgctttaaaaggcggtactactaccattatcgattttggaacccagtatccgggagaaacactggcagaaggcttaaagaactggcatgaaaaggcagatggaaagtgttcctgcgattacagcttccatatgtctattacagactggaacccttctgtttccaaagaagtccaggatatgatggatgaaggaattacttcttttaaactgtatatgacttatgatacccaggtagatgataagaccttatttgagatcttacagagattaaaagagactggcggtatcaccggtgtacactgtgaaaacagcggtatgattgcagctttacaggaagaagcaaaggcagcaggaaaaatgggtgtttccagccatccaaagaccagaccggtagctgcggaagcagaagcaattggaagactgttacgtctggcagaagtagcagatgttcctgtagttgtagtgcatctgacctgtaaagaaggatatgatgtgattgcacaggcccgcaagagaggacagaaggtttatgtggagacctgtccacagtatctgctgatggatgacagtctttatgaacttcctggctttgaaagtgcaaaatatgtgtgcgcgccgcctttaagaaagaaagaagaccaggactgcttgtggaaaggtctggcagacggtaccatccagactgtttctactgaccactgcagctttaccacagagcagaagaagttaggagaaggcgactttaccaagatcccaggcggtatgccgggtgctgagacaagagggactttgatctatacttacggtgtagataagggtcgtatcacaaaagaagatatgtgtcgcgttctgtctgaaaatcctgcaaaactgtatggcttatacccgagaaagggcgtgatcgctccaggaagtgacgcagaccttgtgatcatgcgtacaggtgtagaagatgtgatcacagccaaagatcaggtccagaatgtagattatgcaccatttgaaggtacaaaagtgaccggaagagtggaaagcgtgttcttacgtggacttcaggctgtaaaggacggaaaagtggtagaagagaagaagggcgagttcctgaagagaggaaaatatgctctgtaaaatagagtgagtgagaaaacgggctctggcagctgactaatgtggctgccgggcccgttttttgttatggcagttgactttccccgccaggcggggttccaatgctatatttatctcactttcgtaaaaattcctcgcaaatcatagattgcatgccgtggacatttcactgcacacataccgcagcttaagcaggatgcttcatcaatcactgcgcagttgtcttctacgtggatggcactggcagtacaggtcttttcgcagatgccgcagccgatacagctgacggcacagacacctcttgcgtctttgcctttatctttgttggaacatttaacagcaatggtattggcacagtcgtgtaagtggatgatgtgctgaggacattctctggtgcagcgtccgcaggcgatacatttttcttcatctacttcagctacgccatattcattcagatggatggcaccgaatttacagctttctacacattttccgcaggcgatacagccataggaacagctggagccttctgttacatgacatccgccgttgcaggctacaaaagcagaacgatatggaaatttctttttaacagccatgattagaatctcctttcataaggtgttcctgaaattggaaggctgtagcggcgttctccgtcacagcgatagtaagcgtctgtaatggccggagcagtagggatagaagtgatctctccgataccgatggctccgcaggctacattcagaccaggtttgtcaataacaatggcttcgatctcaggtacttcatgagcgcggaagagacctaaagaaccatatttttcaataggcttgcagttgtcatcaattggataacgctctcttaaagcatatcccatggacataacgacaccgccctcgatctggccttcgcaggataatgggtttactgccttacctacatcatgggcagcaaccattttctcgatcttcttggtctttggatcgacgatgcacatctgggtagcataaccgtaagctacgtgggatacagggtttggtacgtcagctcctaacgggtctgtctttgcaaggtattcaccgtagaatacctgtcccttcaggtcatctaaggaatgatgttcgctggcattctttgcttccattaccttttcgcaggcacggcggcaggcttcaccggtaactaaagtctggcgggaaccggaagtatcaccagagtcaggtgcgatccaggtgttgctccgctcatatacgatctggtctcttgccaggtcagtatttgtaactaccatctgtaccaggacggtaccaagtccctgcccaatacaggaagcaccggtatagatgtgcagttttgcgtcatcttctacgattagttttacacggccccagtcagggataccaacgccgacaccggcattcttcatagcgcaggcaagaccaacggctttaccagaagctacagcagcgtcatattcttcttttacagcttccagtgtttcaaccagaccggtggaattatctacgatctgaccgtttggaagaacgccgcccggacggatggcattgcggtagcggatctcccaaggagtgataccgatctcatctgccatcatgttcagaagagtttctactgcaaaacaggtctgtgttacgccgaaaccgcggaaagcaccggctggcgggttgtttgtataataagcagttccctcgatctcaaagttttcataagcataaggacctgcagcgtgggtacatgcacgttccagaacaggaccgccaagggaagcgaaagcacctgtatcagaagcaacttttgccttaacgcccatgatcttaccgttttcatcacagcccatggtgaaatccataacaaagtgatgacgctttggatgtaccaggagagactctgctcttgtaaggcttacttttacagcacggcctgtgcagtaggtcatcagtgcagcgtgatgctgaacggacatatcctctttgccgccgaaaccgccgccaactaaggcattctgtaccttgacttttttgctccctaacagtctggtacattcgtgaagggtagtatgggaagactggtcagtagtgatcaggaacacatcgccgtcactgtccatataggaaacaacacattccggttccaggaaagcatgctcagtccacggagtctcaaagtgatgggaaataacgtgtgctgcatgtttgatggcttcctcagcattgccgcgacagacatgtttgtaagcctgtacattggaggtttcctcatcatatactaaaggtgcatctggtgcagctgcttcttcaatgttgtggatagccggaagtacctcatactcaacttttaccagtttctttgctttctccagagtttctctgtcttcagcaaccaccagggcaatggcatctcccagataatgggtcagaccgcctaccgggatcagtgtatattggtcatgctttaagtgtccaaccagattttcaccaggaacatcttctgcagtaagtacagccacaacaccaggaagtgcttttgctgcagaaatatcaatagaaagcacacgagctcttggatatttgcttcgtacagcagagccatagcacatgttgtcaaaatagaagtcgtccggatatttgccatatcctaaaactttttcttctacgtccagacgatggactctggaaccgatcttccagtcagttgcgctgtcttccgggataattccttcacgtttgatcttggctgccagacggatcgcagcaatgatctttacataaccggtacagcggcagtagttgttgcggatggcatagcgtatctcagcttctgtcggatctggatttttatctaacagtgctttggtacacataaccatgccagggatacagaaaccgcactgtacagcacctgcttccccgtaagcgtaggtgtaaactttggattcccagtcagtaaggccttctacggtaataatgttgcggccctctaaggtgtccgtggtaggaacacaggcgcgacaggtttcaccgtcaatgataacggtacaggcaccgcaggcaccttgactgcatccgtcttttacggaagtcagtttcagctcgtcacgcaggaaccgtaacagggactgcttacgtgtagttgtcacagacttgccgtttacaaagaatgtagacatatgtataatctcctttcaaggtagaaacaaataagttgttaaaacgaataataaatcgaccatttatacttttattttatcatagaataaacaaaaagcaacaacaatctcaaaaaaatttatgtatgaacaaaaaaattgtaagcgcttatttcaagggagaataacgaaaatccccggtttttgaagataacgtaagtcaccttcagaaatcggggatgtaattggtaaaatatggaaaaaattatttttgtgggagaaaaaactatttctttttggggtccggacgttctgcacgaagctggtctgtcagctgctcgatcatctgcattttcatatacacatcaaaggaaagttcacagataaaggaaaataatttcaggtaatcctggtcgccgtcttcctcagaaacatcctggaatgtatccattgctttctggaatttagaggcgatatctgttttaatagaggacatttcactttcttctaatgtaaatacttctctgtaaatgtcttccaatgaaagactggaaccatgacctgtaaaatgtttggcggtgataggcttaaacagttcttcaatatccctgaaagataacaggctcttaaaatagtagataaagatcagcatgagcatgtgttctttggaatatttctttttaacaggtggtgggagaagattattttttgcgtaattattgatcatggtcttggtaaggaccttgtcttcttcataccgtctggtgttctttaaatgttcttccataaaggttgtgacctgatccatatacaggtcaatattggggatctcttccggttgtacgtgggtctgtctgtcaagataggcgaaaagatcctgaagccgttcttcatttgttttcattaaaagtcacctcggtttatattgtaacattgctatatatattatatagtattgaatactatatgacaagaataaaatgttgatgattttttgaatgaaatggtttataatgtttcgatgtaacgttactttaataagttcacgcgtaaaacagctaaagaagtgaatgtgaaaatacacataatattaagagcaacttaaaaaatacactgtaaaaaacaaataaaacaaaaacagaaaaataaagattaataaaataaattgcacaaaaactatttgacatatatcattggcaatgctataattcatttaacaacattattaataatattagagataatattaaaaaaggaggaagatatatgaagaagagagcaatggtgatggcagtggcagctatgatggcagccggagcactgaccgcatgcggaggcggttccaaggataccgcaggtacagctgacacaaaagccgctgaagagaccaaggcagaggaaaagagcgaggagaccggtgcagaagcatctggtgagaagcaggtattcccggctggtacagtaactgtatatgcaatgggtaacccgcagtacagacagcagtggtttgagacctggctggacaaccacagagacatcgctccggatgttaagatcgagtttgtacagaccaagggtaccgctgatatccgtgagaagatcacaatgaccgcactttccggtgctaccgatgaccttccggatgcagctatgttagaccctgttaccatccaggaccttgcaaaggcaggtttattaaaggatgagacagagtacctgaccccacttattgacaagatggtagatggtgcaactacagatgcaaccatcagcggtcacatctatgcactgcctgactctgtaagacctcaggttctgttctacaacaaagctattttcgatgagtatggcattgatccagaaatgatgaagacgatggacggctatatcgaagctggacgtcagttaaaggaaaagagcaacggagaagtttacttatcttatatcgatcctaccagtaagacctggagatactggggacgtcgtggtttaatgccatctgcaggtgctaagatctgggatgagaacggtgaagttgtgatcggttctgacgaaggaaccaagaaagctttaggcgctcttgatactatgaatacagaaggacttctgttaaagaccaccatcatggagccggctctgtatgatgcaatcaacaaaaagcaggttgctactttctgcatcggcgctttctgggatgagttcatgcgtaagaactgtgaagctaccaagggtgactggagagttatgtccgcacctgaatttgagggtgtaaacaaggcaggtgctcctgtttcccagtacatgggtatcattgaaaaaggtgacaatccttattccgaactgttccgtatgatgtggtatgatttcacctttgacggagctgcaaaagaagagtgggttaagtccatggaagagcagaatgctccttattccaaccctgtttccaaggaactgttacagtctgacttctggaaagaaccatccgatttctacggcggaatgtccttccgtgaaatggaaggtaagtgcctggagaatggcgcagagaacctggttgtaactcctcaggatgctgaagcagatgagatcatttctgcagagttagagaactatgttgcaggcaaccagaccatggatgaagcaattgcaaacatggacaagaacttaaaggctaagatcggaaaagccgagatcgttaaataatctatttataaacagccaggcggtttactgacagaagaccgcctggcgtaactaaaggaggaggtagaacatgcttaaggcactgaaaaagtataaagctccctatctgtttattctgcccttttttatcctgtttttcgtattccagctggttcctaccatatggacattctacatcagttttactgactggaagggaattggggatccggaattttccggtctgggcaattacaagaaaatgatggttgacaacatgttctgggagtcacttggaaatacagttgtctattggctgacaggcctcgtctttattttattctgtgcactgttgattgcatgtctgttaaacagccgttttttaaagagcaacagcgcaagagcatttttcaaaacagctacattcctgccaaatatctgtgcagccatcgctatgggacttattttccgtatgctgtttgatgaaaatgtaggtctgtttaatgaactgcttaccatatttggtggcagtaagatcccgtggcttacaagtaccacgtattccaagatccctgttatcatcctgaatgtgtggagatatacaccatggtttaccatgatcctgttatccggtcttttgaacatttcaaaagattactatgaggcagcaactgtagatggagcaaccggacttcagcagttctggtacatcacactgccatctttaaagaatattttattcttctgttccgtgactctgactgtagatatgtggaaactgttcaatgagtcctatatcctgccaggtcctggtacatccaatacatccctgttccagtacatgtatgagtctggtttcaatgtatttaacatgggatatgcatctgctattggcgtagtactgatcctgatcctgatcgttatatctgtgatccagtttatcgtgcgtcataagcagggagaaatttaggaaaggagaaccgacatgaaccataaaaaagcaatgtcttccgcgatcacatatggggtactggtgctgatcactattgtatgtctgttccctattgtatggatgtgcctgatctctatcaaagacacttctgaaagcattaccggctttaactcaattcttgtaactcatcctacactgggcaatttcaaacgtctgtttgagatgatccctgtaggccagaatacatttaacagtgtatttaccaccattatgggtactgtaacttccctgtttttctgtgcactggcaggttttgcttttgcaaagtataaattcccgggaaagacagttttattctattttgtaattgctaccatgctggtaccgccggaagttggttctgtaccactgttcatcatcatgaaaaaagtgggactgatcaacagcctctggtctttagttatcccaagaattgcaacagcagttggtatcttctacatgaaccagtatatcaccgatgttccggatgaactggtagaagcagccagaattgacggctgtacggattttggtatctttatgaagatcatccttccggttatcaagccggctatggcttcctggggtgcgatcacactgatcgcaagatggaatgacttcttctggccattactttacttaagaaaacaggcaaaatacacattgatggtaaccatttccttactgccagtcagtgaaggtttgtctacaccatggcctgttatccttgcaggtaccacattagttatcattcctatcattatactgtatctgatcctggaacgtttccagaaagcaggtatgatggaaggtgctgtaaagggctaaataatgaaaatgaccgatctttattaaagggttcggagaaaataagaacagaatgccgtgtttcaggctgtatggagaacgcctggaacatggcatttttgtgtttagggagaacatttgtttttgtgcctgcttgcaggataggtacagggatgttataatgactccagagaaaaaaaggcggtaataatatgagcatttatgatacattaaatccaaaacaaaaagaggcagtcttacatacagacggccctcttcttatactggcaggcgccggttccggaaagacaagggtcctgacccacaggatcgcttatctgatcgatgaatgtggggtaaatccatggaacatcatggcgatcacttttaccaataaagcagccggggaaatgcgggaacgtgtggatgacctggttggctttggggcagagagtatatgggtcagcaccttccattcttcctgtgtgcgcatcctgcgccgtcatattgaaagtctgggctataccaccagtttttccatttatgacagtgatgaccagaagaccctgatgcgtcaggtgtttaaggcaatgaatgttgataccaaacagtttaaagaacggtctgtcctggcagctatttcttctgcaaaggacaagctgatcactccggaagagtttctgttaaatgcaggagcggatttcagggaaaagaagacaggggagatctataaagaataccagaagcagctgcgcaaaaataatgccctggactttgatgacctgatcgttaagaccgtagaactgttccagaataacccgcaggtactggactattaccaggaacgttttaaatatatcatggtagacgagtaccaggataccaatatggcccagtttaagctggtaagcctcctggcttccaagtaccgcaatctctgcgtagtgggtgatgatgaccagtctatttaccggttcagaggtgcggatatccagaatatcttaagttttgaacatacattcccaggcacaaaggtgatcaaactggagcagaattaccgttctacccagaatatcctggatgcggcaaatggagtgatccgtcataacttcgggcgaaaggataagactctgtggacagccaacggtgaaggagacaagatcttatttaagcagtttgatacagcaagggatgaggcggattttgtagcccgccagatccgtgacagttcatattcctatcaggatcaggcagtgctttacaggaccaatgcacagtcacgactgatagaagaacggtgtattttctataatatcccttacagactggtgggaggagtcaacttctatcagagaaaagaaatcaaggatgtactggcgtatttaaagactattgcaaatggagtggatgacctttccgtgatccgtatcatcaatgtgccgaaacgggggatcggagctaccaccattggaagagtaactgcttttgcgtcagaacacggaatgagcttttatgatactttaaaagaggcaaaacagatcccgggtatcggtaaggcggcagaaaagatcagccgttttattgcccagatggaagccttccgggcgatggcacattcagaagagtactctattaaagatctgatcgatcatattctggaagatacgggttatgaagaggaacttcaggaagagggcgagatcgaggtccagacccgtctggaaaatattgaggaattgatcaacaaagcagctgcctacgaagaagacagtgaacatcctacactggatggatttttggagcaggtggcgctggttgcggacattgacaatgtagatgactcggaagagagggtaaccttaatgacccttcacagtgccaagggcctggaatttccaaaggtgtacctggtaggtatggaggacggtctgttcccgggaatgatgtctattatgtcaggtgataagacagaaatggaagaagagcgcaggctttgttatgtaggtatcacccgtgcaaagaaagaactggtattaactgcagccagacagcgcatggtaaacggagagaccagatggtccaagccaagccgctttattaatgagatcccgccggaacttttagatacggataaattgcagccggtccttggaaaaggaaagcaggatgactttgacgagtcaggacttccatggaaccagggcactaaaagcggtgtcagccggtttggaatgggatataatgcctatgcttctaaaacagcatcaccaacgggaagcagtaaaagttctggaatgggcggttttggcagcagcatgcaaagcttagagccaaagaaaaagccgggctttggaaagacatttacagtccagaaagcagcatcccttgactacaaagaaggggaccgtgtaaaacatgcaaaatttggcgaaggaactgtaaaagagatcatagacggggcaagggattatgaaatcacggtagagtttgacaaaggtggccagaagaagatgttagcgggatttgcaaagctggaacgtgtctgaaaacagtagtaaaaagtaagagtttatggtatactaaataacaaggaaaataagtgcagaaaggatggacctgctatgaacagatttgacagagaaagatgggataccatgggaaaagaggctttaagccgtgtagaagaactgatgaataccagccgtatcaacgaactgatccacaagagagaagaagatgaaaagaaaaagaactgtattctctgggtactggctattatcggtgcagtagcagcagtagcaggtattgcatacgcagtttaccgtttctttacccctgattatctggaagattttgaagacgatttcgatgatgacttcgacgatgacttcttcgaggatgaaaaggcagaagagaagaaaagcgaaaagaaagaagagagggctgaggaaaaagctgaataaaataagaaagaagccataacaggtgtaaaatcttataattttaaaagcgtgtctcatataaaagggacacgcttttcttaggtataggttgctattcgggcatatttgtgataaataagtgatagactgaaatatttaaagtgacagaatacaaaataaggagtagaaaagtgaaaaaaggcgagatttacgaagcgattgtagaaaaggtagaattcccaaacaaaggtattgttcatgtaggcgaggaaaaagtgatcgtgaaaaatgccattcctggacagaaaatacagtttgtgatcaataaaaaaagaaatggaaaatgtgaaggacggcttttagaagtgttagaagcctctgaactggaacgaaaggaaggcgcatgtcctcattttggcgtatgcggcggctgtctgtaccagagccttccatacgaagaacagttaaagatcaaagagggacagatcaaatcacttttagacagtgtgtgcaagtcctatgaatttgaaggtatcaagggaagccccatttctgatggctacagaaataaaatggaattctcttttggtgatgaatataagggtggtcccctggcactgggaatgcaccgcagaggcagtttttatgacattgtaaataccccgcagtgtcatattgtccatgaggatttccgtaaaatattaacagctaccttagagtattttacagaaaaaggcatgggctattacagaaagctgcagcatgagggctatttaagacatttgctggtgcgtagagctgttaagacaggtgagatcctggtagctttggttacttccggacagaccggcaaagaaggaatgccacagtccttagaaacagaaaaagtgttattggaagagtggaagaaaacactgttagctcttaaaatggagggaagttttgcaggtatccttcatatccgcaatgatactctggcagatgtggtacagagcgatgaaactacagttctttatggaaaaggctatttctatgaagaattgttgggcctgaaattccagatcaccccattttccttcttccagaccaattctctgggagcagaggtgctttatgagacagccagaggttatgtaggagaaacaaaggataaagtagttttcgacttatacagcggaaccggaaccatttcccagatcattgcaccggtagcaaagaaggtagtaggggtggagatcgtagaagaggcagtaggcgcagcaaaggaaaatgcagaagcaaatggtctgcataactgcgaatttattgcaggagatgtattaaaggtgatcgatgagataaccgaaaagccagacctgatcatcttagatccgccaagagacggcatccatccaaaggcattagaccgtatcattaattttggtgtggatcatctggtctacatttcctgtaagccaaccagcctggtaagagatctggtgattttacaggagagaggttataagctggaaagggcagtagctgtagacatgttcccggcaactgctaactgtgaaaccgtagcaaaactgatccgtgtaaaataatccggttataaaagggggttacattatgaaacttctgttccgtcaacgcttcttttcctggtttgacagctatgatatttatgatgaaaatgagaatactgtatacacagtgaaaggtcagctttcctggggacactgcctgaagatatatgatgtggccggccgtgaagtggggacagtgaaagagcgggtatttacttttctgccaaagtttgagctgtatgaaggtccgcagtacataggctgcctcagcaaggaattttcgttcttaaagccgtgttacaatattgattttaacggctgggagatccagggaagttttatggagtgggactatacgatcgcgacgtctgatgggcggaaagtggcagtgatctccaaggaactgttccatatgacggatacctatatactggatattgcggatccgaaagatgcccttcatgtgctgatgtttgtgctggccattgatgcggagaaatgttccagaaacaggcattaaaagcggtttagaataaaattacagaagataaaacgaggtgtagaatggaattggcggtgctgacactgtttgcagtgcttttgatcggtgcgctggcggcaggtgtccctattttgtatgccctgatagcaggtctgatcctgttttcggcatacagcttgaaatgtggatttaccctggaacagacggggaaaatgtgtttaaaaggcgtaaatacagtaaaaaatgtgctgatcactatgacgatcatcggagttcttacagggttatggagatcatcaggaacgatcccggctattgttggctattgtgtgcagctgatcacaccttccgtatttttgctgcttacctttttgttaaacagcctggtatcttttctgattggaacttcctttggaacggcagccactatgggagccatctgtattgccatggcccaggcaatggatataagccttgcccttgcaggcggcgcagctatatccggcgcctttttcggggaccggtgttcgcctgtatccaccagcactctgcttgtggcagaagtgacccatacggatatgtataaaaatataccgaaactgatgaaagattctatcgttccttttgtgatatcctgtgtggcatacctggtaatgggatggctgcagtctgcttccggcagtgcggcagcaggagcaggggagctgttttcaagagaattccgtatgggactgatccctctgatcccggcagcagccatttttattttagcaatatgcaaagtagaagtgaaaaaggctatggcagttagtatttttctggcatttgtgatctgtctggtctaccagcatcgtcctcttacggaaactttatactctatggtatttggctatgtttcagaggatgcccagatcagtaaaatgctaaatgggggcggcatccagtccatgataaaagtggtagctgtagtgtgcctgtcttcctgttattccggtatttttgagaaaacagggcttttgctgcctttacaggaaaagatcataaaagcaggagaaaagctggcgccttttgccgttgtacttccggtttctgtgatcgcctgtgcagtgtcctgcaaccagtcgctggctacactggtaacagagcagctttgtaataagctggtgacagatcaggagaaaatggccatgtatctggaagatggtaccattgtgatcgcaccgctgattccatggtccattgcaggcgctgttcctttagcttctatgggagcacctgggactgcgctgtttgcagggtgttatctgtatgcccttcctttatggaggctgatcacagactgttttacacggggaaaacagaaggtataaagtgtattggtttgattggggaaaaacatgaaaaggaagtaaaagtcatggcacaggatttgacaaagggaaatccattttccgtaatcttaaaattttcactgccggttatcggtggtaatctgtttcagttattttatactctggcagatacagtgatcgtaggcaggacgctgggagcagacgctttggcagcagttggttctacggcgattgttatttatctggtactctgttttatctagggtattaccggcggttttggtatctgtctgggacacaggtttggcgcaagagatgaaaaaggaatgcgtcgcagtgtggcagtgtctattattctatgtgtttttttctcactggttatcatggcgatctgctgcggcctggctcatcagatcctgtactggcagaaaacaccggaaaagatctacgatatggcttatgattatatgtttgctgtattgttaggaaccggtgcgactatcttttataacatgatatccaatattcttcgtgcattgggagacagccgtacacccctggttttccttgtattttcctctcttttaaacattgtcctggatgtagtatttattgtcccgtttaaaatgggagtagcaggagctgcctgggcaacggtactcagccagcttttatcagcaatattatgtacagtgataggcgtgagaaaattcctcatacttagactgaagaaagaagattttcaaaatcttggttctgtgataaaaactcacatgagtatgggatttcagatgtctgttatgtgcatcggccagcttgccatgcagggagccgttaatgcactgggaacagaggcaattgctggatatacggcagcgacgaaagtggatcagttttctgtacttatgaatgcagcttttggtatcgccatctccaactatgtggcccagaactatggtgccggtctgtgggaccgtatccgcaagggaacggcagcctgcctgcttcagacaagcattgcaaatgctcttatgtgtgtgatgatcattttcggacgccatctggtcgtgcccatgtttgtaacacagcccacagcagagatcatctggtattctgattattatctgatgaccgtagcgcctttttacctgcttcttggagtgctgcagatctatcgttctgccatccagagtatgggcaacagctggacaccctttacagcctgtatcattgaactgatctttcgtattacatccaccactgtgtttgcagggatcatcggttatgtagggatctgctttgcaacgccctttgcatggatcggggcgagcgcattgttagtgcctgtgtactggcatgaaatattaaaaagaagaaaaaagtaaattcggaaaagaaaaggacagaggtgatcaaccttctgtcctttttagctattcatattttttctttttctcatattcagccagcgcagataaggcctcatttgaaagaggaaagagcactgccagattaaaaatagtcatcagtccgatgccaacatctcccagatcccacaccactgtataagcctggatgccgccgatgaagagcatgatcagggccaggatcttatagagagtctgccacagccagcggtttccgaaaagataggacacattggaacgggcataaaagaggataccaaggaaagtggagaaactgaacagggccaggatcacagctacgaagatcacaccaaagcttcccaggtggtagttcatggcagtctgtaacagctccattcccataaggccacgggtcagttcttccgggacaaggagcaggataaaggcagtacagctgcagatcacaatggtatcaataaatacgcctaaagcctggatcagtcccattttaaccggttccttttcatcagcagcagctgccgcgcagggagcagaaccggagccagcctcgttggagaaaagaccacgttttacaccattcatcagtacagctccaaaaccaccgcctgctactgcacgaagtccgaaggcttctttaaaaatcctggaaaatacgcctggaagctgtccgatatgggtcacaatgataaaaatcgtgatgataaaatacatagccgccataacaggaacaatgatatccagtgcctttatggtggcatttttgcgcagcacgataatggcggataagatcaccaggatcacagtggtgatgataggtggtacagaaaaagcatttttaaaggcagaggcaacggagttgctgatcacctggctgatgccgcaccagcataagagtccggataaggcgaagaaaactgcaatcacagagtggttcagtttctttccacggactttttctgcataatagtggatatagtaagccggaccgccgtgatagccgccgtacaatgaatcttcctctttatggatctgggccagagttgcctcgataaaagcagtggcagagcctaaaatagcggaaagccacatccagaacacagcacctgcgccgcctgcagaaacagcagccactacgcccaccagatttcccataccaacccgggtagcggtagatacgaaaagagtctgtaacggtgataagctgttgccatttcctttcttttctgtcagggaacgcaccatatccggaaaaagacgcacggatacaaagttagtacggaaggtaaaataaatacctgttgggatcagaagcagtaccagaagaggaataccaatggaagtgcctgaaaggtgcagtgtaaccagatctccccacaaaaagtggtaaacagcttcgattatatgaacgatcataaattatctccagtcattttcatttttggacctgttaaaacgttgaaacacacttaaacgctttaaagggccagtttaattattgtacactgtttttgatgatttgtaaaactataaaacagtggaaaatgtctattattggtaacttcttgccgtttcatggtatacccgggtgatctcctgaaggatatccatatgggtaaagtcttttttgtatacgatcttggtctcacgcatcatacttaagttttcaataggaagaacggccatttttccttttttctgttctcttgcgcaggcactctgaggcaggatggaaacgcccagtccttttcgtaccaggtcttttatagtggcgatattgtcaacttccagagtgatgttgaaattgtcaatggagtccccgatgctttttaatgtggactcaaaaagcatgcgtgtatcagaagtaggaagccgcaggatcatccgttcctgttttaattctgataaagtgaccatggcacgtttggccagaggatgccggatggacataacacacaccagataatcggtagctaacatcagggaacagagggaatgcccggttggcgttccgtccacaacagccagatcgatctcgtaattatccaacatatcataaagattatttatggtatccgtaataattgttattgaaaaattattatcagcattgctgcaacgggccagaacctccgtgatcaggttgctttccgaggtgtgggtgatgccgatgcggactttggtcagctgttttctggaattatcgatctccgtctccatctttccatacagcgctttgatccttcgggcatattttaagacgatctcaccttccggggtcagcattaaactgccttttccgcggataaaaagggtgactcccagttcttcttccagctgattgatatgatggctgactgccggctgggtaagggagagagaagcagccgcttttgtaaaattctggaattcagctactgccagcagagtttctatttttgaaccgagcatggtacctccttattgtgtataataaataaaatttatcatacataaaaataaaataatttgcttttattataaaacagtatatcatatagaagcatgacacacaaggaaaacgagggggttatagcatgaagtcatttttattttaccatgcaacaagccaggcatcggtggtcattatcaccattgcactgatgctgtttgttggttatcttatgacccgcatcaccagaaagtttaaactgccaaatgtaacggggtacattctggcagggatccttatgggaccctactgtctggatatggtgccggtgaaggtcatagatgggatggattttctttcagatatcgcgcttgcttttattgcattcagcacaggggaatttttccgcttttccgtgttaaagaaaaacggctggaaggtgatcgtgatcacggttatggaagcggtgctggcatcggtatgtgtatttgcagtggtttatggggtgctccacttaaatctggcattttccattgtactggcagctctggcatcagctacagctcctgcgtccaccatcatgaccatccgtcagaccggagcgaagggagattttgttgatactcttttgcaggtggtggcattggatgatgtggttggtctggtggagtacagtgcggctatttctattgcgctggcagctttttccgggactggtggtttccaggtgggaaatatcttaaaaccgatcctgatcaatggggcagtactggtgttaggcggtatttttggctggctgttaaaatgcatgatgccaaagagaaaatacaaagacaaccggctgatcatatcggtggcagcgctgtttgctttttgcgggatctgttctctggcagatgtatcccctcttctgggatgtatgtccatgggaaccatttatattaatttatctgatgatgataagctgtttaaacagttaaattatttcagtccgccgatcctgcttttgttttttgtacggtccggactttccttccggttagatgcgcttcttaatccctcagcaggagaagacggggcttcccttttagtgatcggagtggcatatttcctgacacgtatcataggaaaatacgcaggtgcttatttaggctgtcttgcagtacataagaaaaaacaggtgcgcaattatctggggctggcactggtgcctcaggcaggcgtagccattggtctggcggctctgggagcaagaactttaggcggtcagatggggattgatctgcagaccgttattcttgcatctagtgtactttatgaactgacgggtccggcatgcgcaaaattgtccctgtatctgtccggatcctatggggatattgaactgccaaaagaggcgaaagaaaaagatccggtgacccggttggaaatgctgatcgagcggatccatgagatccagcaggaaataccggaaacagaagagaatatttctccggaagaacaggcatttttggaagctgccaatgagcagtacgaagcagtgggggcgctgcgcaatcatttaagagcaaggaggacgtattgatatgggacatataacagcagaactgacaaagggatggatgatggaaggaataggaatgcaggtgatcctgcggatcctattatcactggcgctggcggcgatcattggatgtgaacgctccagcaagcgtcattccgcaggtatgaggacttttatgctggtcagtgtatctgctacagcagccgtgctcacagatctgtatctgtccagtgaattttcttttgggatccctgttatttcaggagcggccgttgtgggcattgccatgttaagcggcaactccattcttttcagttccaagaaccagatcaagggactgactacatctgcagcactctgggcctgcggttttatgggcttaatggttggggccggaatgtatatttccgcatttgtgatctttatggcacttctttgtgggatttccctgttcccatctgcagagcgttatttaaaagaccgttccaatcattttgaggtgcatctggaattaaagagcagtttcaaacttcaggattttgtagcgacgatccgtaaactggggatccgcattgatgatattgaggcaaatccggcttatttaaattccggtctcagcgtgtatacggtttctctgactgtggacagtcaggaactgaaaaaagataaaaaacacagtgacatcattgaagcactgcgctctcttgattacatttactatatagaagaaatcaaataaaaacgatttgcctactacccaaagcaggaaaagtattgtataattaataggttagcaataacaggaggaatacccaagtggttgaagggtctggcttcgaacaccagtaggtcggtagcaccggcgcaagggttcaaatcccttttcctccgtaaataagaatgtgccttggcacattctcgctccgagcgcggtcgcttgcgacaaacttcctcatcgcgcgagtgcgcatcgttggcaggtcgtgcctttttgtgtactagggagttccaacggaatttcctagtacataagaaagcagccgcaggaaatgcacctttgatgtgttcctgcggctgttttgctattatttcagatcaccggttacagactggggaatggtaaactccacagctcccatataagccggggctacctcggtctcgtcaaaagtaatgaccagttctcctttttcattaaaatagaagctttcattaccttttaattccttaaaatcccattccggcatgtcactgtcaataaaataagtaacagaggagtctgcagccatctgctgtttcatctgttcttttatgttgtcgctgatggcagtgagcatttccggtttgtttttaaataaatcagaaagagaaataatatcaccagtggtcttatcaatggtaaataccttggtgtattcggttccgcttgccatcacaagggtggtgtcaatgcgcaggcacaggtatctgtctgtgtcagttactaccttgtaagtagaagtgagagagtagttgccttctccctgggatgcccgaagatccttttcgtactgggcgatcagttcatttgcgtagtcttcaatggagcggtttacagcttccggtgcagagtctatttccggaatatccactttggcttcaaaatgattggtcttatcttcgtatgtacgtaaagtgaccacttttgcaatggcaccgatcaccggcaggtttgtcatggcattggcaatggttgggcttacgttggtgacaatggccagagctactacagcagcggcagcagtagtgccggtggtgcgtaaaatacggaaaaatgggttgtgttttttattcatggtttttcctttctggatacctgacatgatacgtgcttttgcggcttctggaacgggaatgttgttatattcctgctttaaagactccagtttatctaaatcatcaaaatattctaaattacgatcctgttctttcattaatatatgctcctttcttttaaaaactggcagtgccgtctaaatggatccgaagcttttttaacgaccggtataatcttgcttttacggtgtttacattttcggctaccgcaagggcaatgtcctctaatttcatatcttcaaaatagcgaaggatgatgatggtgcggtttttcggttccaaatggttcagtgcttcttttaagtcaaattcctcatatgtatcttctgttgccgtttcaggaagttcctcggcaggctgctcttttgtccggcttcgcagcaggtccaggcttgtatttactacgatccggcacagccatggaaaaagtttttctgtatcctttaaatttttacactgtgtaatggctttacaggcactttcctggacgatatccaaagcgtctgcttcgttatgtacataactgtaggccaggcggtaaaggcgctcatattggtcaatgagcattttttccgtctgcgcggttatttgttttgtctgatcagaatggttcatgatatgttctcctttcatgtcttacacttattagacgcatgaaccgggaaaaaagttgcaaaagatattataatcttcataaaatttactgcaagtccttaagaagttcttcattgagtttttcagggaataatgttatattggaaaaaagataagatacaggggatagataacttggaaaagcgagaacgaaaggtgataacctttcctatggcggccgtttttatggcaatgatgatcggtattctcaccggtcttggaagcggctattgtatatggggaagagagcctgaaaatacaattgatctgaaagcagtggaaatgcctgactgggtacagcaggattttttgcggaaaaatattttttcccgcccggatgtgacccgcaggcaggtgaaaaatattgtgatccattatgtgggaaatccgggaaccagtgcaaaggctaccagaaactattttgacggtctggcagaccaggatgcacagaaagagggggtttcttccagcagtcattttgtagtgggactggacggggaagtgatccagtgcattcccattgatgaggtggcatatgccaatgctcccagaaatgacgatacgctttccattgaagtctgtcatgcggatgatacaggcaagtttaatgacgcttcttatgagtcagtggtgaaattgacagcatggctctgcaaacagttaaaacttaaaagttccgatgtggtccgtcattatgatattaatggaaaacagtgcccgaagtattatgtagaagataaagaagcctggaaacagttaagagaagatgtaaaagagcagatgaaggcagattaatggagccgtcttgcaaatgtcattggcacgatacatggatctgtaaaaaactctgtaaaaaaagcggagacgcccctataatgggagcatctccgcttttctttcgtggaatactgtataatagcggaaaccatattcttttaacatttcccggcagtagtcaaagccgatgcctaaagtttccggcgtatgggcgtcagagccaatggtgatcccttcaccgcccagttctttatagagacggaaaacatcagcacatggattggtgtttccaagtccatagcggatgccgcctgtgttacattccaggcattttccattttcaataagaagttttaaaagaggacggatatagggttcgtaatcattccaggaataaaattcatttttatggggagcatatcttacaacatagtccaggtggccataggagtcgaaagtatcaaggaggttttgtacccgcttaagggatacttcaaaaaatgcacgaaatccttctttttccccgaaatgtttccagtattccctttcatatggatccatccggtctacgaaatggctggaaccaaggacaaaatcaaattcctttcccaaggttctggcaaaatcgtggagatactcacctacatggttttgtaatcctaattcgatccctatatttaaacggatccgtccagcgtattcgtcccgtattttgcgtaaactttctatataagaaggaatgtctaacgtaaaatcgtcaggacagaattcgctgccgtaatcatgatgatcggtaatacagatctctttcattccaagggagatggctttttctaactgatcccgtaccggggtttcggagtctgcggaaaattctgtgtggagatggcagtcataaatggcatccatagtgatatgcctcctttttatcatattgcgtttgtatccataaaagcacatatctgccccacggggagtgcggcagctgtattcgtctctcacattatactcataaactgccacaataacaagtctatgccccacccttctattgagaaaataaaaatgcgctgaaaattaatggaatttatgagagaaaatagtcagaatggcagaaacaaaaaaaaggcttgctattttggataaaattgagtacaatgtaggcagttgattaatatttaacaaataatatttttttaacaaactaggaggaattgaatcatggcagtaaaagttgcaattaatggtttcggacgtattggacgtctggctttccgtcagatgttcggagcagagggttacgaggtagtagcaatcaacgacttaaccgatcctaagatgttagcacatctgttaaagtatgatacagcacagggtggatacgctggacgcattggcgaaggcaagcacactgtagaggctggagaagattccatcacagttgacggcaagaagatcactatctacaaagagccaaaggctgctgaccttccatggggcgaacttggcgtagatgtagtattagagtgcactggcttctatacttccaaggaaaaagcacaggctcatatcgatgcaggcgctaagaaggttgttatttccgcaccagctggaaaagatttaaagaccatcgtttactctgtaaatgagaagactctgacagcagaagataccatcatctccgctgcatcttgcaccaccaactgcttagcacctatggctaaggcattaaatgactacgctccaatccagagcggtatcatgagcaccatccacgcttacaccggcgaccagatgatccttgacggaccacacagaaagggcgacttaagaagagcacgcgcaggcgcagctaacatcgttcctaactctactggtgcagctaaggcaatcggcctggttatcccagaactgaacggcaagctgatcggttccgcacagcgtgtacctgtaccaaccggttctaccacaatcttaacagctgttgttaagaaggcagacgtaactgcagaagagatcaacgctgctatgaaggctgctgcatctgagtccttcggatacaatgaagatccgatcgtatcttctgacgttatcggtatgagatatggttctctgtttgatgcaacccagactatggtttcccatatcgctgatgatctgtatgaagtacaggttgtttcatggtatgacaacgagaattcttacaccagccagatggtaagaactatcaagtacttcgctgagttagcataatccagatcataaatccagattttaaagactcataaggggtccggtctttaggaccgggcccttttttcgcgaaataaatttatctatttgcgagtttactgaaaggagatatccaccatgttaaacaagaaatcaatcgatgatatcaatgtaaagggaagaagagttttagtccgctgcgacttcaacgtaccgttaaagaacggcgagatcacagatgagacccgtatcgtagcagctctgccaaccatccagaagctgattaacgacggcgcaaaggttatcctgtgctcccacttaggaaaagttaaaaatggcccgaacgaaggcgagtctttagctccagtagcaaagagactgtctgagaaattaggcaaggaagttgttttcgtatctgattacaatgtaaccggcgaagcagctaccaaggctgtagaagctatgaaggaaggcgatgtagttcttctgcagaatacacgtttccgcggcgctgaagagaccaagaacggcgaagagttcagcaaggaactggctgatctggctgatgattatgtatgcgacgcattcggttcctcccacagagcacatgcttctgtagcaggcgttaccaagttcatctctgcaaagggcggctccaacgtagttggttacttaatgcagaaagagatcgatttcttaggaaatgcagttgaaaatccagtaagacctttcgttgctatcttaggcggtgctaaggttgctgataagttaaatgttatctctaacctccttgaaaagtgcgatacactgatcatcggcggtggtatggcattcaccttcttaaaggctgaaggcaaagagatcggtaagtccttagtagacgataccaagttagattactgcaaggaaatgatggcaaaggctgagaagcttggtaagaagcttttacttccagtagatgctgtagtagcagcttccttcccagatccgatcgatgctgagatccctgtagagaacgtttctgtagacgctatcccagatgacaagatgggtctggatatcggtgcagaaagcgcaaagctgtatgctgaagctgttaagagcgctaagaccgttgtttggaacggaccgatgggcgtattcgagaaccctgttcttgcaaagggaaccatcgcagtagctcaggctttagctgatactgacgcaactaccattatcggtggtggtgactctgcagcagcagtaaatcagttaggatttgctgataagatgagccacatctctaccggcggcggtgcttctctggaattcctggaaggaaaggaactgccaggcgtagctgcagcagatgacaaataaagataactgatattgcaggcggctgtttttgaaataactggggataaaaacagaccgcctgtgagtcgtgtatgtgtataaaggagacggaagttatggcaagaaagaagatcatcgcaggcaactggaagatgaacatgacaccttctgaggcagttgctcttgtaaacgaattaaaaccattagtagtaaatgatgaagtagatgtagtattctgtgtaccggctattgatatcattccggcaatggaagcagcaaagggaaccaacatccagatcggtgctgagaacatgtattttgaggaaaagggcgcttatacaggcgagatctccccaaacatgttaaatgacgcaggcgttaagtatgtgatcatcggccactctgagagaagagagtactttgctgaaacaaatgagaccgtaaacaagaaagtattaaaggcatttgagcatggaattactcctatcatctgctgcggtgaatctttaactcagagagagcagggcattaccattgactggatccgtcagcagatcaagatcgctttcttaaacgtaacagcagatcaggcaaagacagctgttatcgcttacgagccgatctgggctatcggaaccggtaaggtagcaaccacagagcaggctgaagaagtatgcgcagcgatccgcgcatgcatcggcgagatctatgatgaggcaactgcacaggctatccgtatccagtacggcggttctgtatcagcagcaagcgcaccagaactgtttgcacagccggatatcgacggcggcctggtaggcggcgcttccttaaagccagactttggtaagatcgtaaactataacagataattactcaggacggcgggaaatttgacccaaaaaggagcgtcaagcttgcttgtaagcgcctttttggggcagatttcacattggagtgatatccgatgcttcttatgcggcaaagccgtgcaagaaaatgcgccgtccgggtggttgcgaatttagccctggggtcgtgaaaacgggtctcagggcatttgtatccattttataaagccttagtaaaaaaggcagatttaagaggagaaaacagatatgagcaagaaaccagtagtattaatgatcctggacggctatggactgaatgataactgtgagcacaacgcagtatgcgaaggaaaaactcctgttatggatcagttaatgagccagtgtccatttgtaaaaggccaggcaagcggccttgcagtaggacttccggaaggacagatgggtaactccgaggtaggacacttaaatatgggcgcaggccgtgttgtataccaggagctgacaagaattaccaagtcgatcaacgacggtgatttctttaatgtaccagaatttttaacagcagtagaaaactgcaagaaaaacaattccgctctgcacctgttcggtctggtatctaccggcggtgtacacagccacttaaaccatatttacggcctgttagagctggcaaagagaaatggcctggaaaaagtatatgtacactgcttcttagacggtcgtgacacaccaccagagtccggtaaggaatttgttactgagctggaagcaaagatggcagagcttggcacaggcaaggtagcatctgttatgggacgttactatgcaatggaccgtgataagagatgggaccgtgtagagttagcttacaaggctcttacaaagggcgaaggaaatacagcagcaagcgctactgaaggcatccaggcttcctatgacgctggcaagtccgatgagttcgttgtaccatttgtagttactgaaaacggaaaagcactggcaaccatcaatgacggtgactccgttatcttctttaacttccgtccggaccgtgcaagagagatcacccatgcattctgcgatgacaattttgacggttttgcaagagagaagaagttagacctggtatatgtatgcttcaccgattatgatgaaaccattaccaacaagctggttgcatttaagaaagagtccattaccaatacctttggcgagttcctggcagcaaacggcaagaagcaggtaagaattgctgagacggaaaaatatgctcacgttaccttcttctttaacggcggcgtagaagagccaaacgaaggggaagaccgcatcctggttccttctccaaaggaagttgctacctacgacttaaagccggagatgagcgcttacggcgtatgcgataagttaactgaggcgatcaagtccggcaaatatgatgtgatcatcatcaacttcgctaacccggatatggttggacatacaggcgtagaagcagcagcaatcaaggcaatcgaagtagtagatgagtgtgtaggccgtgctgtagaagcattaaaggaagtaaacggcgttatgtttatctgtgctgaccacggaaacgcagagcagttagtagactatgagacgggagagccatacaccgctcatactaccaacccggttccatttatcctggtaaatgcagacgctgacatgaagcttcgtgaaggcggcgcactgtgcgatatcgcaccgaccctgatcgaattaatgggtatggagcagccaaaagagatgactggtaagtcactgatcgttagaaagtaataagtaaaaataagcagacgcgcctttagggcgcgtttgttgtatatataatgtatgggtccatgaaacggcctactaaatgtgacgggaattataaatgcattgcatcaaaaatccggaggcagcccatgtgggccgcccccggattttttaggagtaactgctataaataagaggtgattgcgtgctttcttattagaagcccttaatgagttcgccgttctttggctcgaaacgtccagtgaagaagcggagaacttctggctcgtaaacccatttcagaccgctgatgtcatgtcttctctggtacaggccgatgatagcgtcagcaacataatccatatgagcgtatgtataaacacgacgcgggattgtaagacgaacggtttccagtttcggaacgtggttttcacgggtgtgtggatcacgtcctgcagagatgatgccgcgctccattgtacgaacgccggagaactcgtagattgctgcggagagtgcctgagcagggaagtcctcttcctgatctaagtgatctaagaatgctcttgcatctacgaagatcgcgtgtccgccgtaaggtttaaccattggaacacctgctgcgtctaacttttcgcccaggtaacggatctggtttacacggtggctgatgtaatcgaagttcatggactcgcgaagaccaatagccattgcttccatatctcttcctgccataccgccgtaagaaggcattccttcaaactgtacaaccattccagttgcgcgaacatacaggtcatgatcgttcatacacaggaaaccaccgatgttggttaagcagtctttcttaccagacattgtacagccatcgccgtaggagaacatttcatgaacgatctctttgatggtcttgttctcgtagccaggttcacgggtcttgataaagtatgcgttctcaacgcaacgggtagcatcgtacataaccttgatgccgtatttgtgagccagttcggaaacagctttgatattagccatggaaacaggctgtccacctgccaggtttacggtaacagcgaggcagatataaggaatgtgctctgcgccaacttcgtcgatcagtgcctggaatttatttaagtcgatgttgcccttgaaatcaaggattgcacttggatcgtgagcttcgtcgatgataacatcacggaaagtagcaccattgcgctcctgatggaaacgggtggtagtaaagtacatgttgcctggaacataatcgcctggcttgatggtcagagaggagagaatgttctctgcgccacgtccctgatgagtaggaactacatatttaaagccaaacagttcacgaacagtttcttccaggtgatagaagttgcgggatccaccgtaagcttcgtcgcctaacataaggccagcccactgatgatcactcattgcattggttccggagtcagttaaaaggtcgataaagcattcttcagactttaataagaatgtattgtaaccagcagtcttgatcgcttctttacgctcttctttgtctaagcgtgccatgttctctaccattttgatcttgaaaggctccggcgcaaatttcatcatatccatgttcttctccattaaaaaatcctcctattatatagtttttatatagttttttgcagcgcaacattacgctttttgcttaattaataatatgtttttatgcttttttcttcttataattagtttcgtaatcctttaaggcattgatggcctggccggagagtgggacgatcgcgatcatattaaatactgtcataaggcctacgccaaggtcgccaagttcccagacaaattcataggctgccacgccgccgataaagagcatgatcagtaaaaagatcttgtatcctgtctgagctttccaggtatcgccgaatacgtaagatacgttgcagcgggcataatagagaatgccaaggaaagtggaaaagctgaacaggaagagtacaactgcgataaatacaacgcctgcatatccaaggtgatggttcatagctgcctgtaaaaggtccattcccataagaccttcgatcttttcagccggagctaaaagcatcaggaatgcggaacagctgcagatcactaatgtatcgataaaaacaccaagtgcctggataaggccctgttttaccggatggctgacttctgctgcggctgcagcacatggagcagaaccactacctgcttcatttgagaaaagtccgcgctttacgccgttcattacgattacaccaagtccgccgccggcaaactgtctgataccgaatgcctgggagaaaatgtttccaataacagatggaagcagggtgatgttcttaatgataacgaacagagttactaagaagtaggcacctgccataacaggaactaccatatctaaaaccttaacagttgcgttcttgcgaagaacgatgactgcggacatagctaccagaatggtagcagttgcaacctgcgggataccgaatgcgttctggaaggaagtggtaacggagtttccgattacctggctgatacctgcccagcaaagcagtccggagagtgcgaatgcggttcctaaaagaccgtatttacaaccgcgggtgtaataagtctgttcatcatctgccacatattcggcttcttcttttacgttctttacgaaaacatcttctcgtttgatttttgtcaccagtcggatacggtccattacataggcaggaccgccgcgataaccgccgtagagtgggtctttttctttgtagatctgtgccagggtagactctacgaagctgctggaagaaccaatgagtgcggtcagccacatccagaaaacagctcctgcgccgccaaatgagatagcagcaacaacaccggctaagttacccatacctacgcgggtagcggtagcaacgatcagtgcctgaacaccggatatagagttttcatctttttttgcttcgtctttttccagtgtgacccggatcatttccgggaacaggcggaatggaagaaatttagttttaaatgtaaagtataaacccgctggaataaggatcaataccagaagagaaagaccaaactgaacttctccccctgagaattccaggataattaaatctccccataacagatcattgatagctcccacaagtttgatgatcatgtggagtattcggttgatgagatacacctccttttgtaatgtgtgaattgaggttcacgttgcgtcaaaccgtcagggccctctgacatgtcttgcacgatcatacatctgcagcaaccgctggcggctggttctacagatgatgtttgatgcgtgatgc

SEQ ID NO: 3630 - DNA, 50559 bp, Unknown
  gut microbiota DNA sequence
aagccgaccctgatggcgcagaaggatgggacaggaagaaaaaaacaggaaatgtgtgacgggcggatacacctgtagttgtgatacggaaaaagaatgcgaggggcaattttgaaaatatattttgaccgtttgctaaaattgtagtatcatgaaaaaagtaagtggatccatgcgtgatgcactgataacagtacaacagaataaagaaaataagaaaaacaattaagaaaagaaggaggcgggggctatgcccgaaaaaatcattaaacagacactcagtgaacagatctacaacattctgaaggaagatattctgtctggtaggattttaatgggcgataagcttaccaatcgggaacttcaggagcggtttcaggtttcatccacacccgtgcgtgacgccattaaccgactgtcaaaagatggactgacccaggaagtatcaaaaagcggagcacagcttatcacctttgattattcctacgccaacgaactcaatgacttcatcacatttttagcctgtagggctgtgatgctttcttccacagagcctgatacagaaaaactggtagaaaagcttcagatgtatgaagaagaaatggcaggagccaaaacatccatggaatactttgaggcggattttcgctatcataaggtattctttgaccattgcggaaaccgttttatgaaggaaacctataagcagtataattttatccggacccttcttatacgttatgccatccggaccgaagatgaacgggatctggggatcagacagcaccgggggatcactcaggcttttcagaaaaaggattatgagaaggcaagaaagcttatggaagaacattatctgtccggtatgcagttagcaagagagcattaccgggaaggggatactttcagagaaaataaaaaatgatcagaaatattgggaaacattaaggagacagttatgagaacagcaatcgctacagacagcaacagcggtattacacaggagcaggcagcaaaattaggtatttatgtgctgcctatgccttttatgatcaatggggaaatgttttatgaaggtgtgaacctgacccatgaggaattttttaaacggatggaagaaggggcagatatcactacttcccagccttccccaggtgaggtaactgacttctgggataagctgttaaaggaatatgatgaaattttatatattcccatgtccagcggtttaagcggttcctgccagacagctatcatgctggcagatgattacgacggaaaagtacaggtggtaaacaaccagcgtatttctgttacccaggagcagtcagcactggatgcaagggatttagctgcaaagggatatgaggcagcccagattaaagaaatcttagaacgtaccaagtacgagagcagtatttatattacccttactactttgaaatatctgaaaaaaggcggacgtatcactccggctgctgcagccctgggaactctccttcgcattaagccggttttaaccattcagggagaaaaactggatgcattttcaaaggcacgtacagccaagcaggccaagaccattatgctcactgcactggcaaaagacttagaagagcgttttcatgacaagaatgcggaacatacctatctggagatcgcccatacctgcaatgaagaaggggcaaaagagctggaagaggctttaaaagagcaatatccaggtgtcccgatcaccatagcacctctttctttaagcattgcctgccacattggaccaggaagttttgcagtagcctgctccagtaagctgaaggagctggaataatttggaaaaagaaaaatggtatgaaaagttaaaggcacagggacagagtattactgtccccatgactcttttgatgatcgcagtggctgttatccctcttttattacagacatggatcctcatcggctcttttaagcagaaccagatagaagccaggagcattgagatacagaaccagtgtgtgatcttaagcaaccgaatgacccgctccgggtatatgacggcggataaggccaataatgtaagcctggatgcccagatgcagaccatagcggatctgtataatggccgtatcgttattgtcaacagcagttataagatcatgacagatacttttaatctgtctacaggaaaatattatatatccgaagaagttatccgctgttttaaaggggaaagcggcagcagctttaataaagagggtggatatttttaccagactatccctgtttatgatccggcagatgagaaaaagatccagggagtgatcgcagtgactgcttccatggaaaatgttgtgtcggtaacagaacgggtaaaaagcagtgcccagctgttctttctgtgtatggcactggtggcaatcctgttttccattatgtcagctcatttcctggtgcggccttttaagcggctcctgcgttcctttgaccgggtggcccagggggatctggatgcagatatcagcgaagatgcttacagtgagaccaggcagatgtcccaggcagtgcagaagtctcttcgcaagttaaaagcagtggaccagtcacgtcaggaatttgtttccaatgtgtcccatgagttaaaaacccctattacatccatccgtgtactggcggactcccttatgggaatggaagatgcgccggtggaactgtacagggagtttatggcagatatttcagatgagatcgaccgggaaaatcagatcattgaggatctgcttacactggtgcgtatggataagtccgcagaaagccagatgaatatttcccaggtgcatatcaatcatgaactggaaatgatcttaaagagactgcggcctattgccaagagaagcaatgtagaactgatcctggagagcatccgtgaagtaaccgcagatgtggataaagtgaaattaaacctggctgtgaccaatctggtggaaaatgccatcaagtataatatagactccggctgggtccgtgtaacactggatgcagaccataagtatttttatgttaaagtggcagactccggcattggtatcccggaggacagtgtggaccatatttttgagcgctttttccgtgtggacaaggcacgttccagggaagttggcggtacaggactgggactttcgatcacaaaaaatgtgatccagatgcatcatggtgtgatcgatgtggaaagtacaccgggagagggaactaccttcagtatgcgtatcccgttaaattatgtgccaagacaggaggaacggttatgaaacatggaaaaagaaagtttcttctgagtatacttttaggtgtactggtggctgcaatggcagtcctttccggatgtaaagccaggacagaaccaaaatcggatccgggagccggaaaatacctgatctattatctgaattcctcggttacgaaactggttgcccaggaatatgaaacagaaacaaaagatcaggtggcgctggcagaggaactggtcgatcagctgacttatgtgccaagggatctggactgccagactgttttaaatgataaagtgtcttttaaagcctgcaggatcgatgaacaggtactgtatctgtattttgacggcagttatacggctatgaaaccggaacaggagatcctttgcagagcggcccttgcaaggactatgacccagataccgggaattgattatatcagtatctactgtggggaccagccgctgatggaccgtcagggaaatccggtgggatttatctcagcaggtgattttattatcaatacaagtaatgtaaatgcctatgaaaagacggaactgaccctgtattttgcaaacagcaccggtgacaagctggtggcagaaaagcgggaagtggcccacaatatcaatacgtccatggagcagctgatcgtggaacagctgatcgcaggaccatccgacagcagccatcaggcagtactgccatctgactgcaagatacttagtgtgtctgtaacggataatatatgctatatcaattttgactctgcttttttaaacagcaaccaggcggtaaatgaatatatccctatttacgccattgtaaattcactggtagataaaacctctgtttctaaggtacagatcatggtaaacggttcccaggatgtaatgtttcgggaagtggtatctttgaatacggcctttgagcggaatacggattatattgagcaggaataaaggcggatcaaaagcggaaagataaagcagaaattaagaacaaaacaggagaaaacagaatatgaaacggccccttgtggtgataactgcaggttttgtacttggagaggtgcttgccctgtgtttgcaggaggctgtatacagaatatttttctggtttgcaggagtgctgtttttgacagtgcttgctgtcaggcggtttttaagcaggagtgtcatgtacaggacgcttctgcttatttttgtgtttgtttttggcgggatgacggcaggaagtttttcaggcgccaggtgccgggaacagatggagcaggaagaaaagaggattatccaggcaggatttggggatgtggtgcagctgaccggccaggtagtggatgtacgggaaaaaagtgaaaaactggaaataattgtaaaccaggtaaaagtgggaaagagagtgcgaaatattgctgacccggatgacatccggtggctgtcacttcaatatccggtgcagctttctggaaccccaggtgatctggaaggctgggaagagaagcttcttcctgggaaacaggtgaaaatggcctgttctttccgtctcacagaacctgctaaaaatccgggggaatttgatgcaaagctgtattaccggtcaaagggagtggtgtgtaccggttacataaaagctttaaaagaaagcagcggggcggatcagccgtttatgaggcttattctgtggttcagacgatattgcagtcatgttctggaagaatacggtgggaaagaagacagcagtatttataaagcaatgttactgggtgatacctcgtttatggagacggataccctggatctgtaccgcagcagcgggatcgcccacttgctggcggtcagcgggcagcatttgtcactgatcggtggtggaatgtatctgcttcttagaaagacagtgggaggtttccgggcttccgggataataggaggcggttttgtgatcagctatggcatatttaccggctcatccgggtctgctatccgtgcagtccttatgatctgctgtctgtggctggcagcagagcggggacggacctatgacagtctttctgccttaagttttgcagcgttaggtcttctgggaaacaatccctatctgatctttcacagcggttttcagctatcgttttcagcggtcctggctatttccggaccggggcagtggatgatccgggagtataatattggaaaaaactgggaaaagacagtggtgatcagtttatgggtgcagatttttcttctgcctgttatggcatggcattattaccagtatcctctgtatgggatgtttttgaattttctggtattgccgctggtgccggttttgatgatagcggggatcatgatattgcttacaggaggatttttgcctttggcagcagggacagctgctaaagtggggcatgtgatattgggttattataaatggatctgtgaaggttccctgaaactgccgggggcagtaaggataatggggaggcccggtccgggacagatcctggggtatattgtgttgtgggggatagcggtggctttattgagatgccagaggtgggggcagaccagaaagatcctgaaaaaatatataaatttgatatttgcagttgcaactctgctcacagcagtattgtttagtttcgctattctttctccacacccggtccgtggttttgaacttctctgccttgatgtaggtcagggggatggttttttgcttaggtcaggaacaaccaacatccttatagacagcggaagttctgaccagaaaaaactgggaagcaggactcttgaaccctgccttaagtctaaagggatctcccgtttagatatagcagtcgtaagtcatggggacagtgaccatataagtggtcttttgtatttattagagcagaaaatgcccatagatttattaatattgcctggtgggggaaaagggggagagatctacggtcaattggaacagctgcagacagaagcagggggaaaaacatattacatgcaccagggagataagataaaggccggagaaatggaatttacctgtatttttgagaaggagacagaagaagaacgtaacgcccattccctggttttatgctcccactataaagatctgcatattttatttaccggtgatatgggaatatcagaagagacagaacttttagatctggcagaagaaaatggcagcatccagcaggaacatttggaacatgtacagatcctgaaaacggcccaccacggttccaaaggatcttccagtcctgcctttttggaagcaatgcctttaaaagctgcttttatttcctacggtaaagacaattcctatggacatccatccgggcaggtcacggaggagatgaagaaacaaaacatttccctttatgaaaccggcggaaagggggcatggacattagaaagtaaagcgagaaacgttattataaaaagaaccgtgaaaagcaggggagaaaattaaaataaaaggttttcaagtaagaaaagaagtggtattgttattaacaaaatttgcagccccatatgccagggacttgaatacaggaggccagaataatgagtgagaaaaatgaaaatgtaaagatccaggtggcatcagtggaagatgcagaggagctgcttgcaatttatgctccttatgtagaaaagacagcgatcacttttgagtatgaggttccgtccgtagaagaatttaaaggacggattgcccatgtattacagcgtttcccatatctgaaagcagtggaagatggtaagatccttggatatgcttatgtaagtccttttaaagagcgggctgcttatgactggtcagtggaaacatctatttatgtagatgaaaatgtgaagcacaaaggggttggaagaaagcttcatgaggtcctggaagctgtcttaaaagagcagggcatcctgaatatggaagcctgcatcggttatccggaagtggaagacgaatacctggataaaaacagtgtcaatttccacgcacacatgggataccgcatgataggcgagttcaaaaaatgtggatacaaatttgaccgctggtacaacatggtatggatggagtacatcattggcgagcatcaggcccatatgacagcaccggaaagcttcccgcagatccgggacagactgaaagaaaaatatggtttagagtagagttgtaaatgcgttgtaagcgtccttcggggcgcttttgctttgtctggggaaattttatttaaagcagtttttggaaaaaagaagtgttgttgatacaataaatccgtggtaaacttggaatgagttttttgaaaatggtagtaaatatttaactgcgaggagaaaaaaatgccagtttttgattttaatgatgaaccgaaagaagaaaagaaagcaccggaatgcacctacactgtgatccgttccaatgaaacaaccgcttctccagaacatccgatcctggttctggacaacagtaatagaaaatgggagcaccattcctggggtgtatttacaaatcccatccgtaaaacagcttttgaatttcaggtagaaggcggcggcactgtcagtgctgacatcttaaaagtagatgcccgctttgtaagcctgcttaaatggctgggcgagagccatatcaatgtacgcctttccggctccaatgaggcggacgggtatgctgtatacaagatccgtgagatcgcctttggcggcggcaccaagctttccgcagaggacggctttttacagtacatgatcgagcgccttcaggccagcagtgcgcctgcagaggagatccgggaagaggatgcagatgaagacggcgatgatatgaagctgaccagtttacagagtattaccgactttatgacctgcgcgggaaggacccttcctgacaatatccgtctttgggcaagaagaaacctggcagttgccaattcccatgaggtttcaccggaagaacgccgtcacgcacagagagctttatccattatgatgaacatccagtggaagagcaattattttgaggccattgacccagacgaggcaagacggatcctggatgaagaattatacggaatggaacgtgtaaaacagcgtatcatcgagaccattatccagatcaaccgtactcatacactgcctgcttacggtatccttttgatcggacctgcaggaaccggaaagtcccagatcgcctatgcagtagcaaggatcctgaagctgccgtggactactctggatatgagttctattaatgatccggaacagctgacaggaagctcccgtgtatatgcaaacgcaaaaccaggtatcatcatggaggcattttccctgtccggtcagtccaatcttgtatttattatcaatgagttagataaggctgcttccggcaaaggaaacggaaatccggcagatgtgcttttaacattgcttgacaatcttggatttacagataactacatggagtgtatggttcctactgcaggtgtatatccgatcgcaacagccaatgaccgttctcttatcagcgctccgttaatgtcacgttttgcagtgatcgatattccggattatacagaagatgaaaagaagatcattttcacaaaatttgcccttccaaagatattaaagagaatgagcatgaaggaagatgaatgtgtgatccttccggaagctttagatgaggtagtccgccactattctgatactaccggtatccgtgatctggagcaggcagcagagcacattgcagccaatgccctgtatcagatcgaagtaaatcatgtggatcaggttgtatttgacgcaaaaatggttcgggaactgttaggttaagggacaactcacatgaaacatgtaaaagataaaatgataccggcagtgcttattctggtgctgctggtgatctgggaggcagcagtggacctgctgcacatccctttatatgtacttccatcacctctggaagtggtaaaagccctgttcacggaaggaacagagctttttagccatggcctgactacagtaggagagggacttttgggaattttgatcgcgtcagctttgtcactggtgcttggaatttccatggactggttcccggctgtgcgaaagggactctatcctattctggtagtgacccagacggttcccatgatcgttatggctccgatcctgatcatttatatgggatttggaatggcaccgaagatccttacggtagttcttatgtgtttctttccagtggcagtcagttttgcagacggactgcagcgggtagacgaagaatatgtacatctggtgcgctcctatggggcagaccggtggaaagcttattgcctggtaaagataccggcagcgctgccggaactgttttccggactgaaagtggcagcgacctacagcatcagcggtgctgtagtaggagagtggcttggttcccagaagggacttggctattacctgttaagggtaaagaacagctatatgctggataaggtgtttgcctgcgtggtggtcattatcctgttaagtctggctatgaacgggctgatccgggtgatcgctaaggtgtctatgccttatgagagaaataagagatcgtgagtttcccgccgcaggcggggagcaggtgtaccatttcctgcaatcaacagagaaacagacagaaaatgagaggaaatattatgaaaaaatcttggaaaaaagccagtgctatttttatggcagcagctcttgcagccggacttgcaggctgcggcgcgtctaacaataacaatacagctacaacagctgcaggcaaaagcgcagcagaaagcaaagtaaatggtgaaaacagcccagaggcagatagcaaaaaaacagatgtgactgttatcttagattatgttgcaaacaccaaccacaccggtatgtatgtggctctggacaaaggctattatgaggaagctggacttaatgtaaacattgtagagccgacagaaggcgctactgccacactggttgcagtaggaaaaggtgattttggcatcagttatcaggaagatgtaaccgttgccttagcgtccaaagacgcccttccgatcaaggccatcgcagccatcatccagcacaatacctccggttttgtaacttatgcagacaaggatatccactctccaaaggattttgagggaaagacctatgcaggctggggcggacctggtgaagaggctgttttaaaagctgttatgacacaggcaggtgcggatccttccaaactgaaccgtattatctctgacggttccggttttgaagcactgaaagacaaagtagatattgagtggttttttgaaggctgggataatgtaaagtgcaagctgaatgatttcccgatcaactacatggagctgcgccagttagatgagcgtctggattactatactccggtgatcattgcaaataatgatacgttagaaaaccgcccggaactggtaaaaagcttcctggcagcaacagaaaaaggctataaatatgccattgaaaacccggacgaaagtgcccagatccttcacaaatatgccccggactattctatggatctgttaaaaacatcccaggaatatctggctggaaagtatatggaagataccgaccgctggggtgagatgaaggacagcgtatgggataactatacggactttatgacagaatacggcgtcattgaccatgccattcctgctgcagactgctataccaacgaatttcttccagaataaaagcgtattacttataaaagagtatcacttataaaggagtgccacttatgacaaaaaagctggaggtctcagaccttgtatttgactatgaaaaccggaaaatactgaaccacctggatttttctgtaaatgaaggggagtttgtcagtatcctgggaccttccggctgcggtaaatccactcttttaaagctgcttaccggagttttaaaggcagagaaaggtcatattttagtggacggacaggagataaaaggcgttacagagcattttgcctatatgccacagaatgatcttttattcccctggaagaccattttagaaaatgtgtgcctttatggccggatccatggaagcgctgatgggatgaaggaacaggcaagaaagcagatggaagcctttggtttaaagggttatgaagatgaatatccatcttccttatccggcggaatgcgccagagagcagcatttttacgcacccttttgtgccatgcggatatcctgcttttagatgagccttttggcgctttggatgtgattaccagaggagagatgcaggactggcttttaagtgtgcgaaaacagatgaaccgtacagttcttcttgtgacccacgatatggatgaggccatctatctttccgaccgtattctggtactggatgcgaaaaaaggcaaggtacggcaggaatttacagtaaaagaagaaaaacgaaacagggagtggctgtatgaacagggcgctctgcgcagggagatctataaagagatcatggaaggtaaggtaaatgtatgatacagcttacagatgcccatgcacatataaagaatgaaaaacaggccatggaacggataaccttagggatccctaccatggcctgtgccggtacaccgggagaaatgcaagaactggaaaaatttggaaggctgcagggagcagaaaagatcctgatccctgcctgcggccttcacccatggtacagtgacaaatgggaaccggaagagatgttttccttaatggaaaaagtgcctgtaataggcgagatcggaatggacagtgtgtggtgtgatgtgccacttgaccggcagaggaaggctttggaaaaacagctgcagtttgcctgtgagatcaaaaagccggtagtccttcacaccaaaggccaggaaaaggagatcgcccgtatcatatcccattatccaaacacctatctggtccactggttttccggggatacaggtcttgaagattatctgaaactggactgctatttttccattggaccggatgttttgtggaacccggcagtacagaaggtggcagagcagatgccggaaaacaggatccttatagaaacagatggaatggaggctgtggactgggcttatgaagaaggaaagaaacagggatttcttaaagagaaaaaagaaaacatgatgccggaaacttctctgtttgagactctgaaaacaacggcaggacttagaaactgtgaaccggaagcgctggcagaggcggtgtacgccaatttttatcgttttatatccgttcatatggtcgtatggcgcagtgataaattactaaaaactggactggttaattaattgaaaactggatgtttgaaaaaaaccaattatcatttatccttgtgttaagctaataaagcaaatacaaaaagaaagcctgatgctattctccctgggccccgagaacccgtcaggaagagaggaaaaggatgatgagtatgaacacaaaacaggcagctgcggctgcaaaaagcggatacagcacaaaagaacttgttttagacgcaatgtttattgcactgacctatgtatttacagcatttgtaaatgttagactgcctatcgctgccaatggtggactgatccatttgggaaatgtgcctttatttatctgtgccattctattgggcaagcgcaccggtatgttagcaggcgctttcggtatgggactgtttgatctgttatccggctggactgcatgggcaccatttacatttgtgatcgtaggtgctatgggttatgtagttggtgctatgacagaaggacaccgcagcacagcaagagatgcggcagcgatcgctgtagcctgtgtgatcaaagtagttggttactatattgcagaagtgatcctgtatcacaacctgtttgctccggttgcttctattcctggaaacctggtgcagatcggtacagcagctgtgatcgttctgatctgtgtagagcagcttcgcaaggtacttcgtcctattttaaaataagacagaaaaataagagaaaggaaccattatcatgtacgatatcatgacacccggcccaacacaggtaagggaaaatgtacgtcaggcgagagcgcttgcctgcaccaatccagatctggatgcagatttttatgatttttataaggagacctgtgaagagatcagcgaactcctttatacaaaaaatgagaccctgatcctggacggagaaggcattttgggactggaagcagcctgtgccactctcacggaaaaaggagaccgggtgttagtaatggacaatggagaatatggaaaaggtttcgccggtttcgtgactatgtacggcggagaaccagtcctgtattccacagattaccgcagtgcttttgatgtaaaagcgctggaagaatatctggaaaaggatcacgattttaagtatgcagccttagtacactgtgatactccaagcggtatgttaaatgatgtttcaaagctttgtccattattaaagaaatatggtatcctgaccctggtagactccgtttccgccatgttcggtgaagaaatgcgtgtggatgattaccggatcgatcttctgtgcggcggttcccagaaggcagtttccgcacctccaggattaagttttgttaccatcagtgatgatgcttataaggcaatgcattccagaaaaacaccggttgcgtctttctatgcaaatatcctggcatttgacggctactatgagaagcagtggttcccatatactatgccgatcagtgatatctatggtctgcgtcaggcctttgataatattaaaaatgatccgggcatgttagagcgccacgcaaagatcggtgaagcagtaagaggagcggtagtggaagcaggactggaattataccaggaaaccggtttttccaatacagtcactgtatttaatgttccggaaggaaccacagatacagccatccttactgcaatgaaggaaaaatgcaacattatgttagcaggttctttcggtgcttttgcaggaaaggtgatccgtatcggtcatatgggtgaaaatgcatatcctgaaaaagtagaagctgtgatggccggactggacagagtatttgcagatctgggaattacattaaaatgcagcctgaaagaggcttatgataagagaatgaatggataatggtttaaaagaacggggggctgagatgcccccttattcttttttggcataaaagctgatgagataaataccgcatatgcctactatggtatagatgatccgtgacagcaatgtcatgcttccaaaaagaaatgcaacaaggtcaaacttaaaaaggccgatcagcccccagtttacagctccgataatggataaggtaagagctgtagcgtccagtgccgtatttttcatggcagtttacctccttatacatagccagtatggaccggagacagttaaaatatacatgatcttatgggatcattgaaaaatcacctgccaaaaaatctgtgaaagagtaaaaaattttcaatgacaattaacggacagtgtgctatgctatgttgcgcggaacctgagtccgcgtttatttatgatctgttttgatataagataagaaaggtagaaaattatggaacaggatatgaccaggggcaatccactgtcagttatttttatgtttacattgcctcttgcagttggaaatattttccagcagctttataatatggcggatacgatcatcgtaggccgctttgtgggagcagatgccttagcggcagttggctccacaggaaccattatgtttttgctcaacggttttgcacagggcattacagccggcttttccgttcttacggcccagcggtttggtgcgggaaaaaaggaaggggtaaaagaaagcgtgaccaacggcgttcttttatctattataggtgccattctttttaccgttttaagctgtgggatcatgaacccgctgctgcatctgatgaatacgccggatgatatttttgataaggcatatacctatatcattttgatcagcctgggaatgatcgccaatgtattttataacttattgtcctcttatttaagagcagttggaaacagcaaggcacctttatttttccttgttttttcagcctgcttaaatgtaggtctggatctgttttttattgtagtcctgaaaacgggagtggcgggagcagcctgggctaccaatctgtcacagggagtatcggctgttttgtgtgcaggatacatttttttgaaagtgcctgccctggtgccggagaaaaagcactggcgtcttaccagaagagatacccgctatcagctgcagatgggtattcccatggctcttcagtttgcaattacttcttccggaaccatgatcatgcagtcagctatcaatcttttcggttcagaggcagtagccgcctatactgcagcctgcaaggtacatagtttgctgacacagggaatggtggctatgggacagaccatggcagtttacagcggccagaactacggaaaaggagatgcaaagaggatccgggacggtgttaaggcagcattgctgatcgatgtgatctactctgttgtatcagccgtgctggtatccctgctcttaggtgtgacactgggcctgttcttctcaggagatgtggaccttacggttatgatgccctgggcaaggacttatattaccatctgtacattgttttatattcctcttagtacgatatttattttcagaaataccatgcagggatgcggctatggtttccttccaatgatgggaggtgtagtggaactggtagccagattgagtgtggctatgatcgccatgcgtgttcacagctatgcgttgtcctgtttctgcgatccggctgcatggctcagtgcaggtttgtttacaggtgtgtcttatctttttgtaatgaagaagatcagggcatcactggaaccgaagtcagttacggttcagccatgacagaacggtaaaactctatagtaagtatagataggtatagacaaaaactgaggcatttttacaaaaaaatttggggtgtacgggggtgaaaattatggatctgagtattggtcagatggccaggatcaaccacatcagcatccagactttaagactgtatgataaaatggggctgctaaagccggtagcagtagatgcaggatccggatacaggtattacagtatccttcagtgtgccaagctggatctgataggcagcctgaagcagtgcggcctcagcctgaaagagatcgggtcatactttgaaaacgggaatattgaaagcctggagggggaacttcgcaataccttagaccagatcggtacagagatgagacggctgtcagaacagaaagaggcagtaaaacgcacgctggagtcttttgaacagtaccgtgtggctccgcctgcaggtactattaccctggaatatatccccagacgcagtattatcgtgctggacagcgggaataattactttgaagaagggctggaattttatgaacacagccttttgcagttaaaacacgccttggcagatcggaatgtggagcatatatattaccgcaatccaggaaccatctggcgtaaggataaggtgatgaagcgggaatttgtttccacggaagtttatgtccgggcagatgcggagaggttccgtcctgatgagatcacagagatcccggcgggaatgtatcaatgcatttactgcagcagttttgatacagaaaaggagctggcatgtaagcttcttgatcaggtggaaaagaacggatataccattgcaggggattatctctgtgagactattgtggaaacacctatttttgagaaggatgaaagaggaatgtttttgcggcttcaggtgcctgtaaatgtgaggtaagagaaaaaattgtcctaaatctgcccttgactctctacttagtataggctctataatgaaagtacaaagaaggttaattaattaacaagcaaatcaatgttgccaatgttattattcatgtacatcattacaaggaggttacactatgaataaagagagaatcagagtggttcagtacggatgcggaaagatgtcaaaatacacactgcgttatctttatgagaaaggcgcagatattgtaggcgcgatcgatgtaaatcctgctgtagtaggcatggacgttggacagttctgcggactgggatttgatctgggcgtaaagatccgtaacgatgcagatgcagtattggatgagtgccagccggacattgccattgtaaccttattcagttttgtggatgactgctatgagcattatgcaaaatgtttaagcagaggcatcaatgtaattaccacctgcgaggaagcaacctatccatggaccacttccgcagcatgcaccaataaattagacgttcttgcaaaagaaaacggctgtaccatcgttggagcaggtatggaagatatcttctgggtacatctgatcggaaccgtagcaggcggctgccatgatattaagaagatcgaaggcgctgtaagctacaatgtagaagattatggtcttgcacttgcaaaagctcacggctgcaacctgacaccggaagaatttgaaaagaccattgctcatccggaagttctggaaccatcttatgtatggaactccaacgaagcgctctgcaacctgatgggatggaccattaagagccagacccagaagtgcgttccatatttctccgataaagaagtttattcagagaccatgggactgaccattccggtaggacgctgcattggtatgagcgcagtggttacgaccgagactttccagggaccagtgatcgagacacagtgtatcggtaaagtttacggaccagatgacggcgatatgtgtgactggaagattaagggcgagccggatgttaccttctatgtacagaaaccggatacacctgtccacacctgcgcaaccatcgtaaaccgtatcccggatgtaattatggcacctccaggatttatcaccgtagacaaattagacagcgtagaatacagaacttatccaatgcatctgtatgtagatgaatattaataatagtaatacaagtgtttttaagcttaagcggccgcagtgatgcggccgtttttctgcttctatttggaaatatctgggattaatgataaaacttggcaccagaaagggttgatcgcccttgcgaaaaagtaaattcggatatataataagcaagtctgtccagatgggaaaaactggaagataagaaaaatgcaaaggaatttagaaaaatatgtggttttggcttgctcttattgcgctcctgtgctggagcggatccgacctgttttcaaagattggctgtcgcggcaatgacaaatatgcccatttaaaaatggtcattgctgttggtattatcatgggtatccatgcactgtacgagatcttcgtaggcggtgtggaagttacctggcacgtaatacttacttatttaccggtatccctgttatacatttcctctatgacactgggatatatcggccttcgttacattgagttatctatttcttcaccgatctgcaactcttccggtgccctggtagcagttttatgctttatcacaggtacactggatgatggaattgaaggttccatgcgtctggctgttatgggcgctgttgcccttgtatgtatcggcgtcatcggacttggcgtcgttgagtcaagagaagatgatgagctgcgtgcagaacgtcagaaagcatccaattacaaatatgcaaaatcctggctggctctggcacttcccgttgcgtactgcctgttagatgcagcaggtacatttgcagataccttagttcttgatacactggctggtgaagcggaagcagcaggattgtttgcaacagcagaggagtgctcttcctatgcagcttctgtatccaactgtgcttatgaactgactttcctttttgcagctgtctgctgtatcgtatatgtaggctttatcaaaaagcagaagtttgcattcagccaggaaggaccgaaatacttcggtgcaatctgcgagactgctggtcagtttgcttacatttttgcattatctgatactgcacatgctgctatttctgcgccgatcatttccgcatactgcgtggcatctgttgtctggagccgcattttcttaaaggaaaagctgtcctggaagcattatgcaatgatcctgctggttatcattggtattgtaatgcttggtgtgtttgatatttagaataaaacgagagatgtctttttacaatttacatttcagatcaaaggctgctgtagaaatacggcagcttttttgatatgataaaaggagcagaaaaggggaattatatatgcttcaggataaatggatcgaatttgcagtagaacttcaaagccttgcacaggcgggactggcttatggaaaagatgtgtacgatctggaacggtataccaggatacgggagatcgcagcggagatgatcgcatgcaaaagcgatattccgctggaaaaagtaaaaaatctgttttgcaacgaaacaggttatcagactccaaaagtagatacaagggcggctgtttttaaagagggaaagatccttctggtccatgagaaaaatgggacctggtcactgccgggaggatggtgtgatgtaaatcagtccgtggctgaaaatacagtgaaagaaacattggaagaagcagggctgaatgtaaagccggtgcgtatgatcgcagttcaggacaggaacaagcacaatgatccgccttatgcttatgggatcgtgaaagtatttattttgtgtgaagtgatcagtggggcatttacggaaaatattgaaacaacagagatccggtattttggtaaagaggaaattcctgaaaacctggctctggaaaagacgaataaagaacagatccaaatgtgttttaaggcaaatgaagcgaagcactgggaaacgcagtttgattaaattattaaaataaaaggataaaaagctgatatgacggatattcagaaacgattatttgaattacaggatcatgcatatggggatttccacagcgggctgatcccggaactgccaagagagtattttatcggggtccgtgtgccggttctgaaaaaatttgtaaaagagtataaaaaagaggcagagtcagaaacatttttaaagcagctgcctcatacctattatgaagaatacatggtccatatccttttgctgggggagatcaaagactatgatacctgtatgaaggtagtggaagaatttcttccctatattgacaactgggctatctgtgacggcctttctcctaaggtatttaaaaaccacaaaccggaattgttagaaaagatcaaacagtggatcccttctgagcatacgtatatctgccggtttggcattgaaatgctgatgcgctggttcttagatgaagattttaagccggaatatctgaaaatgccggcttctgtccggtcagatgaatactatgtgaatatgatgatcgcctggttctttgcaaccgctcttgcaaagcagtgggatgcaaccattccttatctgcaggatccggttttagaaccgtggacccacaataagaccatccagaaggcaagggaaagtttccgcattacgccggagcagaaggaatatttaaagactctgaaagtagggtgcaaaaagagcatcaaacggccataaaacagtcatcaaacagtcatcaaacagcgtaaaaatcctgaaagttgggaaaggcagaaggaaacataaaaaagggcaaaaggagtacatctatgacactgcagcagctgacctacataaaaatgacggccgaatgtggaaatatcacagaagcggcagaaaaactctttatatcccagccaagcctcagcgcagcgatccataacctggaaaaagaaatgggagtgactatttttgtcaggtccaaaaagggtgtagtccttaccagggaaggggaagaactgctgtcttatgcgggaatgctgttggaacaggtggatattatgaaggagcatttcggcgtcggaaaagcgcggatgcccaagttttctgtttcctgccagcattattcctttgcagtcaatgcctttgtagatgtggtccagacctatgatgcggcaaaatatgattttatcctcagggaaacacagaccggtgagatcattgatgatgtggcaaatggaaaaagtgagctgggagtgatctatctgtctgaacacaatgaagaagtgctgacgaagctgatcaaaaagaatggcctgatctttgaagaattatttacagcagagccgcatgtatttatcagcaatgtacatcctctggcggtgaaagcgaagatacagttagaggatctgaaggcgtatccatatcttacttacgaacagggggagcggaattctttttattatgcagaagagtttttaagcatgctggacatgcctaaaaacattcaggtaagagacagggctaccatgtttaatctgatcattggtttaaatggttttactgtgtgttccggagtaataagcgaggaactaaatggctcccagatcattgcaagaccgcttgacatggatgttcagatgcggatcggtctggtgaaaaagaaaaatatactgttcagccgttatgcagatacttatattgaagcactgaaaaaatatgtatccatagattgaaactatggataacataaaatataaagtattatcccaaaatgaaaactactgttaaactatcctcagaaaaaaacagacgggaaccagataacaactggttgattgatctataaaattgtgaaaacggaggataagacagtggcagatttaaaaacaccatttcgttatgattatgtaggaagcttcttaagaccggaagcattaaagcaggcaagaaagaattttgaagaaggaaagatcacaaaagaagaactgacagcagtagaagatgactgcatccgtgatctggttggaaaaatcaaaaagctgggatatcatgtgatcacagacggtgagttccgcagatccacctggcatctggattttatgtggggatttcagggcattgagcatagaaagacagtagaaggaaatacgactttcgatgcagaggcagctatgatcgacgatacctacatggtaggcaagatctctgtaaagaaccacccgtttgtagagcattttaaatttgtaaaagcattagaagatgaaaatacagtagcaaagcagactattccgtctccaggacagttttatgcttactttacaggtgccgagcttcttggaactacactggatatctatggaagtgaagaagcttttgcaaaagatgtggcaggggcatatgtggaatttgtcaatgagatctacgcagcaggctgccgcaaccttcagtttgatgactgtgtatggggcggtatggttaatccaaagctggcagttgcattgaccggaagaaagggagatgcgttggaggcatacaagaaactgctccttcagttaaacaatgaagttgcagctcaggcaccggcggatctggtgatcaatacccatgtatgccgcggaaactatcattccacatttttcagttccggtgcatacgacggagtagccgacctgctttttggcgaggaaaatgtaaatgcctactatctggaatacgatgatgaaagatccggcggttttgctcctttagcaaaagtttccggcgacaaaaaagtagttctgggccttgtaaccaccaaatccccggtattagaaaagaaagaagacgtgatcgcaaggatccatgaggctgcaaaacacgtgcctttagaccgcttatacttaagcccacagtgcggtttcgcctcctgtgagatcggaaacaagcttacagaagaagagcagtgggcaaagttaaaattggtgaaagaaattgctgaagaggtgtggagatagaaataagcaaagtgaaaaaagaagaggatcaggaggttttatcttgttctttcttgggaaaaagtataccgtcgcatttgcctggctttgtttttatggtatctggtttacagttgtctgacgcagttttgcagactgtcgaaaaaagcggggatcctgctggtgccgtatctggtgtggctgacttatgtgggatatctgaatttcatgatcagtattttgaattgaagtgagaatgagtaagttaagaatagataagaacaaatgtttgcagcgttcatggacaggaaaaatggcgtatggtatactaaacagtaactggtcatggaggtttaaacatgggttctgataagatttatattgctattgatctgaaatctttttatgcttccgtagaagcagtggatctcgggctggatccgcttactgctaatctggtggtggcggatccttcaaggacggaaaagaccatctgtctggcggtatccccttctttgaaggcttacgggatctctgggcgggcgagattatttgaagtggtgcagaaggtgaagcaggctaatagtctgcgaagaagcggattgccacagcgaaagtttacagggagatcttgtgatgcgaaaatgcttgaaagggatccgcggcttgagattgattatgtaatcgcgccccctcagatggctcactatatggaagtgagtacaaagatctatcatatttatttaaagtatgtggctccggaggatatccatgtatattccattgatgaagtatttatggatgtgacagagtatctgggcacttacaggatgacagcccgggaactggcgatgaaaatgatccaggatgtgttaagtgaaacaaagatcactgccactgcggggatcgcccctaatctgtacctttgcaaggttgccatggacattgtggcaaaacatgtggctgcggatcaggacggagtgcggatcgcagagctggatgaaatgtcttatcgccagatgctatgggatcacaggccgcttacggatttctggagagtaggaaaaggttatgccagaaaactggaagaaaatggaatttatacaatgggggatattgccaggtgttctctgggacgttctggggatttttataatgaggatctgttgtttcgactgtttgggatcaatgcggaacttctcattgatcatgcatggggatatgagccatgtaccattgcagatataaaggcgtacaagcctcaggataagagcattggctcggggcaggtattgcattgtccctgtgattttaaccaggcaaagctggttttaaaggaaatggcggatatgctggcaatggacctggtggataaagggcttatagccagccagatcgttctgacggtggggtatgatattgaaaatctgacggatccggtgagaagaaaagcgtataaaggggcagtgactacggatcagtatggcaggaaaatacccaagcatgcccacggaaccattcatttaaaactgccgacttcttctgcaagactgatcatgcagggggctatggagctgtatgatggtattgtagataaaaatctgctgatccgcaggctttatattacggcagaacatgctatggaagagaagaaggtacaaaaacaggagacttatgagcagttaagcctttttacagactatgaagcagtggagaaggagcgagaaaaggaagtaaagaacctggagaaggagaaaaggttgcagcaggctatgttggatattaagaagaagtatgggaaaaatgcgatccttaaggggatgaatttggaggaaggagcaacggctatagagcgcaaccggcagatcggagggcataaggcgtgaaaaagtatgaggatatcattggtctgtcaagaccggtttcaaaaaagcatcctcctatgtcaagggagaaccgggcggcacagtttgcgccttttgcggctcttacgggatttgaaggggctattaaggagactgccagggtgacaggggagaagatcgaactggatgagacgcagaaaacgtttttggatgaaaaacttaaggtactgctgcgcgaaaaaactcccgccctctttacgtattttcaaaaagatgaacaaaaagaggggggagcttatataactgtttcagggatcgtgaaaaaaacggatgcttatacccataagatcgtcttagaagatggtaccgggatctgcgtggaagatatcctggagatacggaaacttctctgatccggcttatacttcagcttcctggtgctggtacatcagttcaatgtatgcaaggatcagcggtgcaacgcctttcgcctcatttttaacgatcggttcgcgcatataataatcaaaggttccttcccgcatttctttatttccaagtcctgccacaagacagatcccgcccagttgcagttctccgttttcttcagaaaggtaagtgcgacagatcccttcaaatgctttctttccataggcaaaataggatccgtccaggaaaccgagacgtacactcttcatgatcgcatatgcaaaaattgcggaaccggatgtttcaagatagttgggatgaattccaccccggtttacgacctgataccacattcctgtttcttcatcctgatagggaagcatggaatcaataagttccttgtagatccgattcatttctttcttttcgctgccaagagtttcttctggcattacttccattgtatcgatcagagccatggcataccagcccaatgcacgcagccagaagttgtcagataatcctgtgactttatcacaccagaaagacgttctggagtcatcataagcatggtaatacaggccgtttctcagatcacgcatcagattgtacacattgacgaactgctgatagcagtctttgcaattagtactgttgttgtaagtaacttcatattgcatataaaatggctgtgccatatagagtccatccagccagatctggtttggataaatttctttgtgccagaaattaccagttgaagttcggggctgggtctttaactggctgtataccaggtcaatagcgaggcggtatttttcttttccagtcagatcatacagatcaaagagggtttttccagtattaacattgtcaaggttgtgttctttaggatcataagaatggatggaaccatcttcttctacaaaatagtcaataaaccggtctgcaaaatcaagatattcttctttctgtgtaatatgataaagttccaaaatagcattgatcatacagccatccatataattccaggaaggttttgcaccttgacggattttttcaatattccagatcggacgggacggactgcttttttctaaaagctggtcaatgtagcggtcaagaattttcatagcaatatagatttcctttctgaattgtacaaagtaaaaaagtatacagtaaaaactgaaaacgtttgcaactactttgattttaacataaatccagcagaaagaaaattgtgcataatacacaaagtaaaagcaactaaactggataaaatgtctaattgacgggagaagggatgcgtgataatatatgaaatatcacgagagacatgcaggactgatagttggaccgcagaaatgtgacagcatccaggatcaggaatgcattaaattttagccgaatttgcaaacctttgcaaaacaacagggcatgacggggatggttctgtaattctggcaaatatcaaagaaggagttgtgtgtggtgaatggatacgttcaaaaatattataaaatttgtatgtatacaataaaaaacaacatatgtatacatacaaaatatacaatgatatattgacattacactaggcttatactattataagagtacaaggcaattggaattaggatgttttgtggcgaaaacagttaaattccagaattatttatgaaacaggaggaagaaaatgaaaatgaaaaaggaattgatgaagcgtgtggcggcagcaggtctggcagtatctatggttgcagggcttacagcctgcggacctacaggaaagcctgaagagaccaagaaggaagagacaaaggctgagggcggagagacttccgcagctgcagataaggaagatgctgcagcttctgacggagaagttactctgcgtttcagctggtggggaggcgatgccagacataaggcaacagaggcggcatgtcaggcatttatggaaaaatatcctaatatcaaggtagagtgcgagtacggagcctgggacggatgggctgagaaggtagctacccagctcagcggcggtacagcacctgatctgatgcaggttaactggaactggctgtatcagttctctagcgacggttctaaattcgtagatctgacccagttcgcagatgtaatcaatatggaaaactatccggcagatcttctggagcagtgtgtagtaggcggcaagcagcaggcgattccgatcggtactacaggaaagtgcttctactggaataaaactacctttgacaaagcaggtattgctcttcctacaagctgggatgagctgattgcagcaggaaccacatttaaggagaaattaggcgatgagtactatcctctggctatgtatgaatatgagagaatgcttctgatgatgtattatctggaaggaaaatacggaaaagaatgggcagagaacaataccttaaattattctcttgaggaagtaaaggaaggtcttgaatttattaattccttagaggatgcacatgttcttccaagcattgctcagttaaagggcgacggcgctacagttctggagaagaatccgggctggatcaacggacagtatgccggcttctatgagtgggattctgctcaggcgaaatttgctaacgctctggaaggcgatcaggagtttgtacttggtgagttccttaagggcggagagtatgaggcaggacttataaagatttcttcctgctttgcaattacagaaacctctgagcacaaaaaagaggctgctatgctgttagatttccttatcaatgatccaaagggtattgagcttatgggcacagagcgcggtatgctggctaacacttatgcaaatgaagttctgtcaggtcttggcaagctggaaggtcttacctatgagggcaatcaggcagttatgaaggttgcaaactttgcacttgatccaaactttgagaattccgcattaaaggattctacaggtatctactatgaggtatttgagggactcagcaacggacaggatgtagagatgctggcacagtatctgattgacagtatcaatgaagtttatgcaagcaatccttactaagaaaaagggataaagagatgaagaacagagaagtaattaattcatatattgataaatggattgaagattataacaacagacagcgtccggtttggaattatgaagatggctgtgtaatgttaggagcccagtatctgtatgaagccaccggagatgaaaagtacatcaattgtattcgtacctttatggaccggtatatacaggaggatggaacgattcgttattatgttcctgaggattacaatctggataaggtaaataacggaagagttctttacttcctctatgaccagaccggggaagaaaaatataaaattgctctgagccatatcagagagcagctggaaacacatccccgtacagactgcggaagcttctggcataagcagatatatccgtatcagatctggctggacggattatatatggggcagcctctttatctggaatacgaaaagagatttaatggcggagagcgctacaatgatattacaggacagtttttaaacgccagaaaatatctgtttgatgaagagaaaaaactgtattaccacgcatatgacgagaagcgccagatgatctgggcagacaaaacaacaggctgctcccacaatttctggctgcgctccattggatggtatctgatggcgctgattgactgctgcggcctgattcccgaggagagctttgaacatctgagtacatataagcggctgtttaaagaagctctggcaggaattatgcagtatcaggatgaaaaaacaaagctgttttatcagctggtagatatgcctgagctggaaggtaattatctggaaacgtctggatccgctatgattgcatatgcgattttaaagggctgccgtctgggtattttacaggaagaaaaatggcgcaggagaggcgaagagatctttgacggcctggaaagagaaaagttacagaaggatgaagatggatggcatctgaccggcatttgtctggtggctggattaggccccaaggatgagcgggatggaagcgtagaatactatctttccgaaccggtggtttcagatgaagagaagggcgtaggagttttcatgatggcctacggcgaatatctgaagctggaaaaacaagatgaagcatagaatggagaatgccttatgcagaaaaagacaaaaaaaataacccgtgcatccagacagaacataggatatgcatatattgctatctggatcatcggttttctcgtttttaaattttatccgtttatgtcctctcttttctatagctttacgaactataatctgttcaaggaatctgtagaaaatataggatttgcaaattatgagaagattgtcgatacggcaaaatacttaaagtcctatattgtaacctttaagtatgcctttatgacagtacccttaaaactgctgtttgcgctgtttatcgcatatcttcttaactttaagatcaagggaattaaccttttccgtacagcgtattatatcccgtctattctgggaggttcagttgcgattgctgttttatggcagttccttttccagaatgaaggtctggttaacactatcatcggcctgtttggagtaaagcctgttaactggctgggaagcccggattatgcactgtttgtaatctgccttctccgtgtatggcagtttggatcagctatggttattttcctggctgcattaaagggcgttccgcaggacctgtatgaagcggcgtccattgacggagcaggaaaatttacacagtttttaaagattaccattccgctgattacaccggttattttctacaatctggttactcagctgtgtcaggcattccaggagtttaatggaccgtttatgattaccaagggaggccccttaggttctacaaccctgatttccatcctgatctatcagaatgcatttaagacatatgatatgggacttgccagtgctatggcatggttgctgttccttattgttgcagtgctgacggcagtttcgtttatcagtcagaagcattgggtgtattatggtgatgaagaaaggtaggaattaaaatgacaagacaacaaaaatacaaaattcagaccatagcacgctacataattctgattgcagtggggcttgtaatgatctaccccatgatatggatggtaggagcttcctttaaagcaaccaatgcggagatctttggttccatcggttttattccgaaggagtttacgctggacggctataaaaacggctggttcgccagtacctatcagtttggcagatatatggtcaatacctataaatttgttataccaaaggtaataggaaccgttgtttcctcagccattgcagcatatggtttttcacggtttcagtttaaggcacggggcttctggtttgcactgatgctttccacgctgtttctgcctcaggtagtgttaaatgtgcctcagttcttattgtttacaaaatggggctgggtggattcctacctgcctttagttgtgccgagcttttttgcctgtgatacctactttgtatttatgctggttcagttcatgagaggaatttcaagagagctggaggaggctgcggagattgacggctgcaattcctttaagcgtttcatctacgtagtgcttcccatggttcagccttcactggtatcctgcgcgctgttccagtttatgtggtcctccaatgacttcatgggtccgttaatttacttaaattctacaaagaaatttacagcttctctgggcctgcgtatgatcatggatacggaaagcggatttgactggaataagacgctggcattatctgttattacactgattccatccctgattatattcttcctggcgcaggatcagtttgtggaaggtattgcagccggaggagtaaagggttaaagacgcgaattgtaagaaaggacgcaacatgaaatttcagattatatttcagacatccagaaaggtcacgattgaatttttggattttggaatttattttacagaaaagaagtatcgtctgttgttaaatggaaaagaaattcttacttccgatcgggtagttcagaccatttccggtctgacgcctgatacggaatatgagcttactgctgtggcagacggggaagcagaagagacggttcgttttaagacagattatgaatttgtaaccctgaacgtacgccgtttcggagcgagaggcgatggaaagcatgatgatacagttgctattcaggcggcggtgtcatcctgtccggagcacggaagagtgtatattcccaagggagtttataaagtatccagtatcttcctgaagagccatatgacgctggatattggggaaggagcagtgatttctgcttatacagagcgggagaaatttcctattttaccgggactgattgagagctatgatgagacggatgaatataatctgggaacatgggagggaaatcctctggatatgttcggatctattcttacgggtattcatgtttcagatgtggtaattaccggagaaggaactctggatggaaatgccagctatgaaaactggtggaagggagagggccgtgaaaaaatcggaggagccttccgcccaagaatgatttttttgaatcactgtgaaaatgttactgttcagggactgactgttcagaatagtccagcctggaaccttcacccatatttttccaatcatacgaggtggattgatttgaaggtactcaatcccaagcagtccccgaatacggatggaatggatcctgaatcagtagatggactggaagtagtaggcgtatatttttccttaggtgacgattgtattgccatgaagtccggcaagttctatatgggacataaatataaggtttcatcaagaaatgttgatattcgccagtgctatatgagacatggacacggagcggtaactctgggcagcgaaattgctgccggggtgagacatttgtcctgtaagaagtgtattttcgaagatacggaccgcggactgcgcgtaaagaccagaagaggccgtggagaagattctgtagttgaggatattctgtttgaagatattaagatggatggcgttttaacaccctttgtagtaaattcctactactggtgctgcgatcctgacggacattctacctatgtaagcacaaaggaaccgcttccggttgatgaacggactcccagaataaaagaactggcctttcgcaacattgaagctcataattgtcatgtggcaggaacctttatatatggacttccggaagccaaaatagaaaaagtgacaatggaaaacatagagattgattttgcggaaaatccaacgccggagtatcccgcaatgatggctgaggttgaaccctgtacaaaccgaggcgtgtttatcaataatgtaaaggaactcaccttaaagaatgtaaaggttcacggcacagcaggagaaccctttgaaattgaaaatgtagattgtgtggaaaaggagtaaacgatggagttagcgataacaagtaccagcatgaagctgagagatcgagctccggtagttttccggggtgaggataactggtgctttgaacagatccgcagcataggatatgatggcgtagagcttcatatccatgattcctctcagcttgacaggaagcagttaaaggaggaattggatcagtttggcctgagtttgacttcgattggaacaggatctgcctatggaaaagacagggtgtttttatccagcgaagatgcggatgtaagacaggctgcaattgaacgtattaagggacatatccttacggcttctgattatcctcatgctgtggtgattatcgggctgattaagggaaaggtatcagactgcgaaagcagagaaagctattttgccaatctgatacctgctctgcgggaatgtgcagaagaagcgggaaaatatcaggtatatctggggcttgaggttatcaaccggtatgaaagcgatgtgatcaataccgttaaggagggacttgaatttctggaaatggttggatcaccatggttgcagctgcatctggatacataccatatgaatattgaagagagtgatattaaaaaatcaattcaatcagctaaggggaaaatctgtcatgtacacgttgcagataatgaccgttggtttgtaggacatgggcactatgatttcgccgaaacattaggtgctttgaaggaaataggttataccggagctgtcagtgtagaatccttcggttttccggatatgatcagttctgccagggcatcttatgaaaatatgagacatattatgaatcagttataaagaaaagctgcagtgggaaccatcaaatatggaaactctgcagctttttctatccgattttcagattttgtgatagaatagaaaaatgcaatggataattattgaacgggaggggggtgcgaattaagtggagaaaacagtgttgttagtggatcaggcatatgaagacattaaaaatatgatctgtaattttgagttgataccgggccagatcgtatcagattttacattaagtaaaaaaatgggaatgagcagaacgccgatccgtcaggcgctgcagaagcttgaaggcgatgatttgattgtagatgcaggtgcggggaagagctatcaggtcagtcctattacagaagatggaattattgatctttttgatgcaagagaaggaattgaggttgcagctgtacgtattgctcttgaaaaagggattgatgaaacaaggctgatagaactggagcgtattaaccagaatatggaggatgctaatatagccggaagaattaaggaaaattttgaggcggatcagcaatttcatgattatcttgtaaatctctcacggaataaaaaactgatacgttttcatgaaagcctgcttcttcagtgccgtcgggtaaggatgatttcatatctggagcgtaaatatcaggataaagcatacagggatcatcaaatgattttagagggtcttaagtcaggagacagcagactggcgcagcaggcgctggctgaacatattgaaacagcaaggctggattatctgagagttatgaaggagaagaatataacagaggattttgggatgcttcgctttttccgctgaaaaatacctcaagcagcagatgcttggggtatttttaatttccacaagacaaacccccggtaaaggtggtatgataataccaaaagaactaatcagaagaaagcaggtgaagggcttgacattataggaagggaaaagttttttatgaagaaaatgaagagagcagcactggcaatggcttccgttacagcaatttcactggttggatgcggtggaagcaacacaactactacagcagataccaaggcagcaggtgaaagcagcgcagaaggcggaaattccggtgatatttccggtaacatcactttttcctggtggggcggagattcaagacatgaagcaactgaaaaagcgatcgaggcttttcaggcaaaatacgaaggtgtaactgtaagtccggaatacggcgcatggtccggatgggaagagaaacagtccttaaacatcttgggcggcaactcagcagatctgatgtagatcaactggaactggatcgacctttattctaataatggaacaaattttgctgatttaaaccagtacgcagatattattgatctgtcccagttcccggaaagcgcacttgaaataaggctaccgcaatcccactggctttagacggtgggttaaggtagccaaaagctgagaattattgtatgctaatgatatgggaacatggaaatctaaaaacagacacaaatatttattacaataccacattattttcgtctgcaaatataggaagaaattactggtttcgcaacaggtatcagatgatataaagcagttttcatatgagatatgtcaaaagcacaaagttattatcaaatacatggaaactgacaaagaccatattcactacatgatagaaactgaacctacaatgtcggtgagtaaaattgtaaacctaatgaaaagttatacgacttaccatatatggaaacgctatccgaattatttgcggaagcatttctggaaagaacatacattttggacagatggttattttgcttgtagtgtaggaaatgtatcagaagaaatgctaaaaaagtatatcgaaaatcaaggctaagaaagaaggtggcagcgaatgttaaaagcatataaatacagaatatatcccaataatgagcagaaagtacagatagaaaaaacatttggctgttgccgttttgtgtataatcagacacttgcatatcggaaagaaagatacgaaaaagagaaaaaatctgtcagcaaaacagattgtaataattactgcaacagggaattaaagaaagagtatgaatggctgaaagaagtggataagtttgctttaacaaatgcgatttataacatggacagttcatatcagaaattttttagggagcatgcaggttatccaaagtttaagagtaaacatgataatcataaatcatatacaacaaattttacgaatggcaacataacagtagatttcgatggaaacaaagtaaaattgcctaaattaaaaggcgtaaaagtaaaactgcatagaaagtttagcgggcagataaaatcagcaacgatatcacaagtgccgagtgggaaatattatgtatcggttttagtggaaacagaacatgtggaactgccacatacaacccaaaatacaggaatcgatttaggtattaaggatttatgtattacttctggtggaaagaaatacgaaaatcccaaaattatcagaaaaaacgagaagaaactggaaaaactgcaaaggcagttagcccataaagagaaaaaaagtcaaaattactacaaaacaaagaaaaagatagcattatgccatgagaaaataacaaataccagaaaagattatcttcacaagatatcccatgagattatcagcgaaaaccaagtgatagtctcggagaatttgcagataaagaatatggtaaaaaatcatcatctggcaaagtcaataagtgatgtatcatggtatgagctgacaaggcagttggaatacaaggcaaaatggaatggaagggaatatgtcaaaatagataccttctatgccagtagtcagttgtgttcagtctgtggataccaaaatacagagacgaaaaatctgacagtaagggaatggatatgtcccgtctgtggaacgaatcatgacagggatatcaatgcggcgaagaatatactggaagaaggattaagacaaatagcataaaaggaataacaacatagggcaggaactgcccgaattaacgcctgtggagatagtaggttacgaggtcagggaagcaggaagcccattggctttagacaatgggtagttcacgaaagtaagctgtatttttaagaatgcaagatctgctaccattgagatcggggatgaggggatctttcacacaaaacgagaatatgaagtctatgtcaatgacgcattttaccagaagacagaccgggtgattaccgggatctatgatctgcagccttcttccgattataaggtacgtatagtggcagaagatgagcaggcgtgtatcgagataaagactgatgaggaatttgtgacacttaatgtcagggattttggtgcaaagggagatggaatcacggatgatactctttttatccagtctgccattatggcatgcccgaaaaaaggccgtgtgctgatccctgagggaacttataaggtgaccagcctgtttttaaaggatgacctgaatttggaactggcacagggagctgtgctttctgctgaaacagaccgcaggaaatttccaatctatccgggactgatccagagctgggatgagacagaagagtataatcttggaacttgggagggaaatcctcttcctatgttttccgcgatcattacaggtgttaatgtgaaacatgttgtgatctacggaaaaggagtgattgacggaaacgcaaattttgatgaggacaactggtggtatcagccaaaagtgaagcggatcgcattccgcccgagaatgctctttctcaatcactgcgaggatgtagttgttgccggtatccaggtacaaaacagtccaagctggaatatccacccatatttttccgacaatctccgctttatagatcttaaggtactaaatccaaaagtttccccaaacacagatggcctggatccggaatcatgcaaaaatgtagagatcgttggtgtatatttttctctgggagatgactgtattgctgttaaagccggaaaaatttatatgggtgcaaagtataaacgtccatgtgaaaaccttatgatccgtcagtgctgtatgcgggacggtcatggttctgtaacgatcggaagtgaaatggcaggaggagtgataaaccttactgttaaagactgtctctttatcaatacagaccgtggacttaggatcaagacgagacgtggccggggaaaagatgctattgttgacgggatcctgtttgacaatatccagatggatcaggttatgacaccgctcgttattaactgcttctatttctgtgatccagatggacatattgagtatgttcgcagcaaggaggcacttccggttgatgagcgtactccccagatccgcagtcttgtattcaaaaatattgaggcaaaaaactgtcatgttgcaggtgctttcttctacggacttccggagaaaaaaatccagaaggtggttatggaacatgttcatattacctatgatgaaaacccgcagccaggagctccggccatgcttgacggaattgagccatgtacaaaagtaggaatatttgcagataatattgaagaactgataatgcacgatgtaaaggttgaaggccaggagggagaggcgttcatactgagaaatattgaaaacatgatcagtgatccgcaataaaaagtgatatactagtttgtaaaggatatcaaaatgggacggaggaatagacatgggggtaacgatcaaagatattgcgcagaaagcgggggtctcttattctacggtttcgagagcattaaatgggatcggaagtacaaacggggatcgtcggaagcggatattggagattgccaaggagatggggtatgttcctaatcaggcggcgatccatctgaaactttcaagatcctatgtgatcggtctgtatttctcaaccatcagcaagatgacatcacccttcgttctccatgatgttctcacgggagtatacagtattgtagggagtaagtataatattgtagtcaaaggtattgacatgcacgaagcgggaacattaaatccgacctattatgatgggatcattgttttaagccagagaacggaagaccgggcatttatggaggaagttctggagaaaaagatccctatggttgtgatctgccgtaaggtggatatagatgcactcaatgtaacaaccgatgaaacgaaggcaatggaaacagcaatggattatctgatcgaaaacggccatcgaaatatctgtgtgatcgaaggggctccgaatttggactctacaagactgcgccatattggatggcagaatgcagccagaaaacatggcctggatccggatatcattcccactgtcagcgggacttaccggtacgcaagcgggtatcagggggcaaagctccttctggagtaccatcccacagctcttttatgcttcaatgatgaaatggctttcggagcgagagaggctatagtagaagaagggctgaaagtgccggatgacgtttcattgatcggctttgataactgggatatgtctggatacagcagtatgaaactgacaacggttgagcggagtatgagtgagattgcaaaagagggcaccagggtccttttgcgccggatcgaagacggcgtagaggataaccgcaggatcgttctggaaaaccgtctgatcgtccggaatacggtcagacggctggtgtagctggtatacagttttttatatatgagaattatatatgagaaggatcaaagttcctgctcataaaggtaaataaagtaggtcagtgcaagaaggtcggcgctgccgcctggactgatgttgcgttctatcatttcagcatccagttcttttgcataagtaagaagctcatgggtatcatgggctttttcttttagtacagtttggatacgggcctgcagttctttcatttcttcgtaggaagagcggtttacgatgttggtgtcttcggaggtcgcaataatggacagcagggtgatcacaccggcatcattgatggaacggtcttttttcagctcttctttcaggatggggagagctgtttttaatacggttgcgtagccggacagtgcttcaccccgggctcctttcataccatagagggcgtagaggcgttcgccattggtgcgggcggtttctgccgtaatatctttgaaatcttccaggacatcggctaccagtttccggttgatggagagcagcgtgtctggggaataggggatatggtttgcatacatatagcctaaggagcagtttaagatcgccagggagaagataagtcctttgtgtgtattgatgcctttggtggcggtcatcatggcatcttctgcctggatccctaaagagcgcagtcttgcaaagatacgggaaaatggttcgtggccgttttcgtgttctttttccatgccgcagagggcgaatttctcaaagtagtggtttaaggaaacggcgctggcttcaaaggtgaagatgtccatatctttgtgggcgccggtattgttgcggtctaccagtcctggtttaggggtggcgcttacctcgtagagaagggcctgcatggacagggaagacagtttttttgcctgtttttcttcaaaatagtctttcatcagttcgcaggctttatctaacagttcttttactgtgtgggtacgggaacggctgcatacaaaggcatcgttgctgcataaaaggcattttctgcctggaaagccaagttctgtacgggaaactttggtttcatcggtacggatcacatcaatatcgaaaagacggccaaaggacaggctgtcttctaaaaggcagaggatctctttgatgaaaagggtatcacctttaacagaccagaactgttcgtttcctgtaaaatcgcggatcgtccgtttttcaaggaccgggatcttccaggcgtgaagttgggagtcgatgagacggatgccttcttcaaaggtcatttctcctaaaggaaagactttgatgggaccgggaatatttaaggtgaaggaaatgactgtggcattgtgggtgcggatcagttcctgctggatggcgtggcgcctgtctcttgcgtttaacatatccagtactgcaacttcacgtccggtgatgaattgggatgagtctgtattcataaggattttacctccagatcatggtataggcaggttctgaaaagctgcgtttttgagctgaaataaaaagaacctttattaatgagtatagcatataaaaggctttgaggaaagctggttacagtatgccagatgttgaattataataaaatagatgcggaattactttatgactttacagtggcaaaataaatttttctaaaatcattgcgttggatacgttaatgtgttaaaatttttgttaatgaaaaagaacagccggtgcggacacaaaaggataaaggcacgatcgctgtaggaggtagagagatggttctttcaaagaatatgcagaaactggttgcaggaagttctacaataagaaaactttttgaggaaggtattgagctggcaaaggaagtcggcgctgagaatgtatatgatttcagccttggaaacccggccgctcctgtaccggaagaggtaaagaagagcatttatgatattcttgaaaacagaaatgccaattttgtacactgctatatgccaaatgccggttatccggaagtaagggagaaagtagcagcaaacttaaataagaaatacaattcttcttttacaaaagataacattattatgaccgtaggtgctgcaggcggtatcaactgtgttctgcgttctctgctggagccggaagatgaggtcctttgctttgcgccgttttttggtgagtacaacagttatgttatgaactttggcggtaatttaaaggtggttccggctgattatgagactttccagttgaatgtagaggaagctgataagtatattacagagcgtaccaaggctgtgatcatcaacaaccccaacaatccgtctggtgttgtatacaataaggaaacgctgatccgtttacagaaaatgctggaaaaggcagaggaacggatcggacatcctatttacgttctttctgatgagccataccgtgaactggtatatgatggctgtgagcttccatttgcgccggactatattaaaaactgcattgtcgtttattccttcagtaagtccctgtccctgtctggtgagcgtattggatatatggctgtgagccgccagatcgcagagtatgataccatgatcaatgccctggtggttgcaaaccgctgcatcggttacattaatgcaccatctttattccagctggttgtagctgactgcctggatgtaaagacagatgtggaattttatgacagaaaccgcaagctgttatatgagtctatgaaggatatgggctttgagtgtgtaaagccggaaggcgcattttatatgctggttaaggcacctacaggagatgacgcggagttttccgcagcagccaagaagtttaacctgctgatcgtacctgcaaccagctttggctgtcctggttatgttcgtatggcatactgcgtatccaatgagatgatccacagagcacttcctgcactgcagaaactggctgatcattacggactgaagaaataacaggaaaaaatagtgtaaatatctgatcaaaatgtgaatatataactgccgcaaagcagaggatgatgaaaaagtcacctttgttctgcggcagttttttttgtgcataaatccagacagaatatgacaggaaacacccaatttacaacagaattctaccagaaaagcaggggctgtaaaggctatactttagaaaaacgaaaaggagaagaaagtatgaagtcaattgatgttttctgccatttgatgccgcaaaagtatgcagaactggcaatgaatgaatcaccaaacaaatcccacatgtttgtacgtgccctgaaaatgcaggctatgtctgatatggagtacagaaagcaggtgatggaagggtttgaggggtataagcagatccccaatattgtatcaccgcctgtggagctgtttgcagggccggacaaatcaccgaagctggcagctattggaaatgatgagatcaaaaagatcacagacagcgatccggaccgttactgtggatttatcgggggtatcccgtttaacaatgtgtctgcgtctgtggaagagatcaaacgatgcaaggatatgggggcaaagggaatccagatctacacacatatgaacggagaagctattgaccaggaaaagttctggccgatctatgagatctgcgaaaagctggatcttccgatcctgatccatccggtaggaggacagatggtcccggaatttcctacagaggactgctccaaatatgaactgtggtttctcatcggctggccttaccagacaaccgtagctatgagccgcctggcgttttccggtatctttgaggattttcctcagttaaagatcgttactcatcatgtaggagccatgatccctatgctggcaggccgtattgaaaatggccttaagatgtatgggggcagaacagcacctgaattaaaggaaaagctgacaaagacaaaaatgaaaggcaatccgttagatactttcaagaagttttatgcagatactgcttcttttggctctgcttccgcaatccgctgtggtctggatttctttggaaaagaccacctgttatttgcctctgatatgccatttgatccggaaaagggaccgggttatattgacaggactttaaaatgtattgacagtctggggctgtctgcagaagaaaaagagtccatcctttatggaaacgcagaacgtatttttcatgtgtagatgaacaaaaatgtataaatgttcagataacgatttggagggaatcaaatgtcagcaatgatcaattcagtattaacgaaccagttctttttaatgtttcttgccattgcaacaggactgttgatcggaaagatcaagatcggcagtttttcactgggagtttccggtggtatctttaccggtattgtgatcggttattttgtaacaaaatgggctcacacagtagaagagggacagaagtactacagtacagcgaaaaggatcctttctacaggtgtggttgcacaggctttctttactttctttctgctgctttttcttgtttccatcggaatgaaggtaggcggaagtatcggtgccatttttaagaaatacggcagcaaatttgttgtgatcggtgtttctatcccggtggtttccctgatcgcagcctgtgttctttatggaacggttctttcaggaaacgaagctattacaccatttgagaccattggtatgtatgcaggagctatgactaccacacctggatacggaacagccctggatgcagccggtcaggtagattataaggaactgtatgaaaattattctgcagaagacaaagaaaaaatgttattaaagatcgatccgtcaggaagtctgactgtggaagataccccatctttaaatgaagaacaggtagcagcttacaaagaagcagccgcttcttctataagccttggttatactgtagcgttccctatcggtgttcttgtgatcgtagtaatggaaacactgcttccaaaggtatttcgtattgatatggagaaagagcgggagaaatatcagaaagaactggaagaaaatatggcaggtgaaaagaagatgaaacctcagccattaaacttcatgatcctctcttttgttgcgatcatcggtattgcagttggaagtattactattccattaggcggatttggaagcttctctttaggcgcagcaggcggtgtgttgttagcagcactgatcttaagctatgtgggacagatcggacctgtaaatttccgtatggaagataaaagccttggtatcatgtatcagatgggactgactttctttatggcagtagtaggactccgctatggatatgatgtagttatgtctttaatgggatccggcctttcactggcaattgccgctattttcgtagaagcagccgcagtgctggtaagcttcctgatcggtcattatattttcaaactgaactggatcatcttaagcggtgccattgcaggcggctgtacttccgcgcccggactgggagcagccatcagttctaccggttctgaggaaccaacagccggatatggcgcggcacagccatttgcgatccttgcaaatgtattgcttgcaactttgtttttccatttctttttgtaggatatctggtacaatggggcatggatacccttagaaaattgcggggtaaagagaggtgggagagttatggaagatttctggatggaacacagatacagttcctgctgctatcagctggaacctcattatgagcatacatatcagcttgtgtttcttctgaaaggaaaaatcctttatcaggtaggtgaaaaacagtatgaagtgtcaaaaggcgggatgatccttttaaacagtctggaggagcatacattaaaggtgctggaatatccctatgaacggtatatcatccagatcaatcctctgttttttcagaaagagatcaatacgccggagattatttccatttttattaaaagacctgagaatttctctcatcttcttgcccttacagatcccatctggaattatgtgtatgatgtgatccaggaactggaaaaagaataccgtgaaaaacggctttactgggaaatgtatattggtgcagatttaaggcgcatgtttattaccattttcagggaatgtgaagaacttctggcttctgtgcgggtggatgccagcgcagccattgcttataaagtgctgaactatctggatcatcattatccggaagatatctctgttacaaaattagctgaaacatttttcttaaataaacattatatcgctcatgtatttaaggcagagaccggttacagtcctatggactatgtgatctcccttcgtatgaaccgcgccaaggcccttttggcggaaaccgcccgttccatatcggaaatagcagtggagtgcggctatacggattttaaccatttttccaaattgtttaaaaaatatgctggaatgtcaccaagccggttcaggaaaacatcaggaaaggaatagattttatgtcacaggaaagatttcactataaaacactggaagaagtaaaggaacgggcagaagaactgaaggtatatttgccattttcttccagtacagatattttaaaaactcccttaaaagtgggaaatgttacatttcataaccgtatggggatcgcgccaatggagggagctgactctttggaagatggatcaccgtctgattataccatccgccgttatgtaaatgaagctattggcggcagtgccctgatctggtttgaagccatttctattgtgccggaaggccgttcttccaaaacacagcttcttcttacagaagaaaatgtggaaagttataaacggatgaatgaaaaaatcaaagaggcaggacgcaaagccaatggttttgaaccttatctgatcatgcaggcaaaccacagcggccgttattctaatccggataaccgtccggcgcctatgatcgcctatcgtcatccgcagttagagcagtaccgggcagcagatgattcctgtattgttacagatgattatttaaagagcctggaagaaagttttggaaaagcggcacttctggcgaaaaaagccggttttgatgcagtagatatcaagtcatgtcatggttatctgctggcagaacttttatctgcctatgaccgtccggggcagtatggcggaaactatgagaaccgtacaagactgttaaaaaatggcattaaagcagcaaaagtatgggaagatgaaaacttccaggtgacctgccgcctggggatttatgacggatatgaatatccatggggctttggcgtttcagagggaagcgggttaaagccggatctgaaagaaccgatccgtctggtgaaagaactttacggaaactgtggtattcagatgatgaacctgactatgggaaacccatatgccaccactcatgtaacaagaccttttgatatgggaaaatatgagccggaggagcatccttttacaggcattggccgtatgatcgcaggaataggggaagtaaagaaagcagttcctgaaatggtcatttttggttctgcacctacttatctgcgccagtttgcagatctgtatacagcgggggcagtagaagaaggattttgtgatgggatgctttttggaagaatggcctttgctgaccctgattatgccaatgagatcattaaaaacggccgtattgatcctaaaagagtatgtatgacatgcggaaaatgtggggatctgatccgtgcccataagcctacaggctgtgtgatccgggatccaaagacgtttatgcctttttataaagaatttctggaaataaaaaagaaacagcctgctaatttcagaggataaagataaatttgtaaaacaaacagaaataagaggtaaaagatgaagaaaacggcgattataacaggagccagccgtgggatcggatatgcggcggcaaagaagctgggaatggacggatgtcaggtagtcctttttgcgacaggagaaaaagaacgttataaagcagcaatagacggattaacacaggcagggatcacctggcattatgtaagaggatcattggactgtagagaagacagggagcgtctgatcagggaaacagtagaaaaattcggaagaatagatattctggtaaataatgcgggagttgcgccaaaagagagaaaagacctgttagagatgtctgaggaaagttttgaccgtgttttggggatcaatacaaagggaaccatgtttcttacccagctggccgcaaaacagatgataaaacaggagcagatctttaaaagcaagggacatattgtaaatgtgggttcctgttccgcagaagtttcgtctacatccagaggggaatactgtgtttcaaaagcagcggtttccatgcttaccacactgtttgcggaccgtctggcaccggaagggatcctggtgaatgaggtgcgtccgggagtcattgccacagatatgaccagtgttgttacagaaaaatacgatacaatgatcaaaaatggtgtatttcctattgcgcgttggggaaaagcagaagatgtggcagagatgatcgcttttttctgttccgacagtgtactttatacaacaggaaattacgtggatgtagacggaggttttcacatcaagaggctataaaggagggcttacacaatgaaactgaaagagcaaaaaatcgcacaagtggtcatcggaagcggggcggcaggttttcagtctgccttaaggctgtaccagaacggggagtgggacctgacggttgtaacggaaaatataaatgcaggtacatccagaaataccggttctgataaacagacttattacaaactgacgttgtcaggaaaagacccggacagtgtggaaaatatggcagaggatctgtttgcaggacagtgtgtggacggtgatcaggcgctgtgtgaggcagctctttcagcacgttgtttttttgcccttacagaactgggggttccttttccatgtacagaacagggcgagtttatgggatataagacagaccatgacaggggaaggagagctaccagcgcaggcccttatacttcaaggctgatgacagaagctctggaaaaggcagtaaaagaaaaagagatccggatcttagacaagatgcaggtgatcaaacttcttacctttgagggaaggataaaaggagtgctctgcctggataaaaaggagaaggaagaaccttcttatgtgctgatctggtgtgaaaatgtgatccttgcaacagggggacctgcgggaatgtaccatgacagtgtatatcctgtttcccagaccggttctacaggcatggcttttgaagctggcgctgtgggaaaaaatctcacagaatggcagtttggaatggcatctttaaatccaaggtggaatgtaagcggaacttatatgcaggtactcccggcttttatttccacagatcaggaaggtaaggatgaaagagagttccttttagattattttaaggaactgccggacctgctttccatggtctttctgaaaggatatcagtggccttttgatgtaaataagatctttgggggttcttctgtgatcgatcttttagtttaccaggaaaccgttgtaaaaggacgcagagtctttttggattacaggatcaatccgggaaaactgggagaaaaggaagagcttccttatggggctctgatcccggaagccagggattatttgaaacaggcaggcgcctgttttggaacacccattgagcgattgaagcatatgaatgagcctgcaatccatttctatcaggatcatcatgtggatctttataaagagcgtttggaaattgccgtgtgcgcccagcataataacggcggtctctcagctgacagctggtgggaaacaggaatatccggtctgtatgcagtaggagaagtatgtgcgagccatggcgtgacccgtcccggtggaaccgccttaaatgcaggacaggtaggtgcagttcgggctgcagaagggatccggcttaagaaagtggcgcagacagaaaatacagaaaacgatttccgggatgcggatgtaaaagaaacgctgagaaaagaagcatttaagagaatccgtctttctgaaaatgcaaaaggagatatagcattatcagctctctggttaaaggcgtctaagagaatgagcgcagttgcaggtatgatccgcagccgggcacagatggaaaaagccctggaagaaacttcagaagatgtaaagaattttgaaaagaaggtatgtactccttctgtttcacagcttccaatgttttacaagctgtatgatatgctcctttcccagaaagtttatctgtttgccatgctggattacgcaaaagcaggaggagcaagcaggggttctgcattatatacagatccggaaggtgaacttccgggatttgaaggctgtgaaccttttggagaactttaccgttgtaagttagaccggaaggatcatgggaaagaagtacaggaagtggtcttaaaagatggagaggttatttcttccagacggccggtgcgccctattccggatgtggattacttctttgaaaatcagtggcgggcctatagaaaacgcacagggaccgaacattaattataaaaaaactataaaaactttaaaatgtaaaaataaaaaggctgacaggaaaaatcgtaagtatatttcctgccagcttttagtttgtatacaacttttggaaattatgtacaaatatcgaaagtgtattttgtgcgaaattattgtgtaaaaccagttgatattagaaaaaaa

SEQ ID NO: 3631 - DNA, 49601 bp, Unknown
  gut microbiota DNA sequence
aattgtgcatagaagtgctgcggatctcaaatggagtttattgagaaaatcagtcagcaggggggataaaaacctctttgaatgtacgagatttacggacatgaaagtgtccgtgaaaataaaagagagaaggaagtagaagtatgaaaaaaaggttagcattagtactggcaggtgttatgatggtatcatcattagctggatgcggatcatccaaacctgctgaaacaacagcagcagctgctggcgagacaaccgctgcagcagcagatgcaaaagcagacacaacagaagcagcaaaatctgatgcagctccagagttagagctgatcatcgcttccaaccagacttctttagacaacccatattcctatggtatggacaagttcaaagaggtagttgaggatgtttccggcggaaagatcgctgtaactgttcataagggaaccttaggcgagaacgagaacgagctgatcgagaagctggaaatgggcgctgcatctatggtagttgcttccccaggtttcatgaccgctatcggtgttccggaagtagatatcttctcactggaatatctgtttgacagctttgatcactgggagaagtgcttagacggcgaattcggtgacaagatgaaagatgttgttaaggaaaagacaaacaacaacttccgcatcatggcttactggagctcctccgttcgtgattactatggtaaaaagccagttaccaagccagaagatttaaagggtatgacaatccgtactcagtcttctcaggtacagcaggacttctggaaagcttgcggcgctatcccaacatctgtagcatggggcgagttataccaggcattacagcagggcgttgttgactccgctgagaacgactacaccagctttatgttaaaagagcatcacaagactccaaacggccactacatctctgaaacacatcatgactacacaacccgtctgttactgatgaacggcgatttctatgatagtctgactgatgagcagaagggctggatcgatcaggctgttgaggcttgtacagaagaagagcgtcaggtagtttaccgtatgttcaaagagtccaaagagaaagttatcgctgatggcgcagaagttaccaactttgaagatgttgatatcgatgcattcaaggctctggctcttccaatccaggataagttcgcagctgataacaacatgactgctgagttagagatgatccgtgcagcagcagagtaatctgtaagcagaacggaacataagggacttataaagttctgaacatttacgaaagaaaaatgaaatgggtcaggtcttcctgatccggaggatatcagccatctgggcgactggatggctgatgttaggtttaaaagagtgttaatatggtgttaagatttcctgaaaggagaacacattatgaaaaaagcaattgaatggatgcagaagatccagattgctgtaggaggatttttcctttgcatcttccttcttacagttgtattccagatgctctctcgttacattggcatcgcagcaacctggactgaggacgtatctatgtattcctttatctgggctgtatttatgggcgcaggcgctatggtttatgaaaaacgtcactttgcgtttacttccgtcagcgatatgctgaaaaacgagaaaattaagagcgtattagcaatcatcatctctcttgttatgctggtgtttgctgtattaatggcttattatggttataaattaacacagaagttctggaactatacatggaccaatattccgtcctttaagcgtggacctacatggacctgtcttccaatctgtggtgtaacttctactatttatctgatcgcgcagatcattgaagaaatcggtgctcttatgaaaggaggcaacaagtaatgggtgttttattagtagtaatgtttatcgtttttgttgccattggtgtgccgatctcattcgcacttggcgttgtatcttttaccggtatcgcatctctgggacagattccgaatttagttgtattccagaaaatgtttaatggtctgaacagctttacactgttagctgttccgctgtttatccttgcagcaaacctaatgaacgaaggtgagatcactgaaaagctgatcgactgctgtaactctttagttggacaccttcgcggtggtcttgcttattcaaacgtacttgtatccatgatcttcgctggtatctccggttcttcccaggctgataccgctggtgttggtaagatcttcattcctgcaatggagaagcagggatatgacaagggaacatctgttggtgttaccgcagcatcttccacattaggttccattatccctccaagtatcaccatggttgtatacgcaggtatcgctaacgtaagtaccggtgcgctgttcatgtccggtctggttccaggtatcttacttggtctggctatgatggcagtagttaagtactactccaagagaaagaacttccctaagtgtgatcgtgttccgtttaaggaagtatgccgcagaacttttcagtctctgccagcactgcttactcctatcatcctgatcggtggtatcgtcagcggtttgtttacacctactgagtctgcagcatttgcatgtatctatgcattattagttggtatcttcttctacaagaccattaaggttaagaacctgccacgtatcctgatcgagactatgaagctgtcttccctgtctctgttcgctctggctacagcaaatgcattaggcgagttattagcatactatcagttgaatgtaattgtacagaacttcttcgctaatatgccaggcggaagactggtattccttcttgtagtagttgcattctttatgtttgtaggtactttcatggatgctgtaccggcaatgatcctgtttgttccgatcattcttccggctgctacttcactgcagatcagcccgatcatccttggcctgatcatcgttgttaccctggctcttggcctggtaaccccaccttatggtctgtgcctgctgatcgcttcttctatcagtggtattaccatcgaggatgcatttaagggaactcttccttatttcttatcctctatcgcagtattattactgttagtaatcttcccgaacttctggctggctattccggctaccctgttcccgggactgttctaatagaaaagcgcgatagcgcaaatctgagagaaaaaagtatgaaactgtcgcgaaataaggaaatatttcgcggcagttttttactttataggaaagaccgcctccggcgctcttttgaaacagaggaacaggccaaaatgctgtatgaaatgggctgtgatctggctcagggatactattttggaaagccggtgccagtggaagagctcttccggaaaatgaataaagagatataaggtgcttcgtttttttacttataaaaagtgaaagaacagaagcatctttttttgtattcatttaaaaacatgtagaaaaaagtcttaacatcttctaaacatatattctgaaatgttccaaaaaaaataaacaataatccataataattatgcaatatttagtttgataacatttgtgttatgaaataataagaaattcagaattgaaaaggaaaattcatgtggctataataacggacgaaacaaaaaagacaagaaaataggtaggaaggagagtgaaaaaatggaccagctggtagactccctgatggaggaattaaactgtaatacagtatttaccattcctttatttggcgggatcgatgtactggaatcggtggtggtcacatggatcattatggccattatcatgatcggctccctgatctgggtgcatgggcttaagatccgtaaaataagcggaaaacaggcagcactggaaagtggtttttctttcctttataacttctttctggatcttctgggagaagaaggaaaagattacattccttatctgatcaccgttgttatctacatagccatcgccaatatgatcggtctgttaggttttaaatcccccacaaaagacttaaatgtgaccgcgtctttagctgttatgagtattgtgctggtggaagccgcaggtatccggaaaaaaggtgtaaagggctgggtgaaaagttttgcggaaccgatccccattattgctcctattaatgtactggagctgtttatccggccgctgtcgctgtgcatgcgactgtttggaaatgtgcttggcgcagtagtggtcatggcactgatcaaatatctgctgcccttagtggtgccgctgccatttagcgggtattttgatatattcgatggagtgatacaggcttatgtgtttgtattccttacatctttatatataaaagaagcaattgagtaaataaacaaaaatttttaaacaaaaggagaaatcatcatgtcaggattaatcgcacttggagctgcagttgcagtaattacaggaattggagcaggacttggaattggtatggctacttccaaagcagtagatgctattgcaagacagcctgaagcagacagcaagatcacaaaggcacttcttcttggatgcgcactggcagaggcaactgctatttacggtttcgttatcggtcttctgatcatcctgttcctgaagtagaaaggcagtacatatgctaaatattaatttttggaatattgcctttacgatcatcaacattgttgtgctgtatctgtttttaaagcatttccttatgaagccgctgatgtctattctggaagagaggaaacagatggtggaaaaggaattagataaagcggctgctgctaacagggatgcggatctgctaaagaaaaagtatgaagtatcccttgaaaaagcagatgaagaggctggcaggatcgttgcccaggcaaaggaaagggcaggagaggaatacgagaagatcctgtcaaaggcagatgcagatgcttctaaaaagctggaagatgcaaagaaaatgatcgatctggaaagagaaaaggcattaaatgatcttcgtgcttctgttacaggtctggcaatgactgcaacggcaaaacttttgtctgagcaggcaggaccggaaagcgacaagaaacgttatcaggcatttttagcaagcgcaggtgaaaaacatgactgagcaggcaagattatacggaaccgttctttatgaattaaaggtacctgagaaaatggtccgggagaccgggcgcattttccaggaaaatccagaacttatggcagttcttgatgatcccacattgcaggaaacaaaaaaggaagccattattggaaaaatatggaaagaacctgatttttccagtacaatggttcattttttaaagaaggcctgtgaggaaggctgcatcgggcagatggaagatatgataaaggtctgggagaaatgtctgttagatggagcgggtattttatcagccagtcttttttatgtgaccagaccagatgaggaacagcttgcagggatcctggaatttttgtgcagggaatataaaaagaaggatgtgcagcttgaaatggctgctgctccggaactgatgggcggtttcgtcttaaagaccggagatgtggaatatgattacagcctgaaagggcagcttgagcggctgtttcagactgcaggcagataggagttattactatgagtacaatcagttctcaggagatcatctccattatcaagggcgagatcgaagactatgacgctcatgcaggacaggttaatgagactggttctgtgatctgggtaggcgatggcattgccattgtatatggtattgatcatgccatgtatggagagatcgttatatttgaaaacggagtcaagggcatggtccaggatatccgtaaaaatgagatcggctgtatcctgtttggaaaagatacaggtattacagagggaacaaaagttaccagaacaaagaaaaaagcaggtgttcctgttggagcggcttttttaggaagagttgtcaatgccttaggagagaccattgacggaatgggacctgcaaaagaagaggattacctgccggttgaacaggaagcacctggtattgcagaacgtaaatccgtaggagttcctatggagacaggtatcctggccatcgactctatgttccctatcggacggggacagcgtgagctgatcatcggtgaccgtcagaccggtaaaacctccattgcaatggatactattttaaaccagaagggcaaggatgtgatctgtatctatgttgccattggccagaaggcatctaccattgcaaagctggtaaatacattaaagaaaaatgacgccatggattacaccattgttatggcttctacagccagtgatccggcgcctttacaatatattgccccttatgcgggaactgccatggcagagtttttcatgcgccagggaaaagatgtgctcattgtttatgatgacctgtccaagcatgcagtagcttaccgtgcattgtccctgttgcttgagcgttctccgggacgtgaggcatatccaggagatgttttctatcttcattccaggctgctggagcgttccagccgtctttcagataaactgggaggaggttctattacagcccttcctattattgaaacacaggcaggagatgtatcagcctatattcctaccaatgtaatatctattacagatggtcagatcttccttgaaagcgacctgtttttctcaggaatgagaccggcagtaaacgtaggtctttctgtatcccgagtaggcggtgctgcacagaccaaggcaatgaagaaggccagcggtaccatccgtatcgacctggcacagtatcgtgaaatggaagtgttcacccagttcagttctgacctggatgaggcgacaaaagcacagctggcttatggaaaacgtctgatggaactgttaaaacagcctttgggacgtccgctttccatggcagagcaggtgattaccctgtgtacagcaacccacaaagtaatggtaagtgtggatgtaaaacagatcaaaaagttccagatggatatgcttgcctggtttgaggacaaacatcctgaaattggaaatgagatcacggaaaagaaagtcttaagcgatgagctggcagaacggatcgtagaggcagcgaaggagtttaaggaggcagtatggcaaacgcaagagagatccaaaaccgaataaaaagtattcaggatacacgtaagatcaccaatgccatgtatctgatctcttcaaccaagctgaagaaaagcaaaaagcttctggaagatacagaaccttatttttacacccttcagagcctgatccggcgtatcctgcgccatatgggggatacagagcatccttattttaacgccagaaaagagatcaaagaagaggaccgtgtccgtggcctggtagtcattacaggtgataagggtctggcaggtgcttataaccacaatgtactgaaacttgcccatgaatggatggaaaaaagtgataaaaaccgtctgtatgtcgtgggagagctgggaagacagtattttgctgcaagacatgtgccggtagaagaacagttccactacacggtgcagaaccctaccatgcacagagcccgtctgatcgcctcttccctgatcgaggattatctggaaggacgtttggatgaggtgtggatcatttatacgcagatgataaacagcatgaaggtggaagcacagatggagcagcttcttcccctgaagcaggaagatttcagcaatgtggtcattcctgcggatatccatcaggaagagatccagatggtcccatcccctacagcggtcatggaccatgtggtgccaaactatgtaacaggatttatcttcggtgccctggtagagtcattttgcagtgagcagaatgcccgtatgatggcaatgcagtctgccagcgacaatgcggcagagcttttaaatgagctgtccattgaatataaccgggtgcgccaggctgccattacccaggagatcacggaagtggtaggcggtgcaagggcacagcggaagaagcggagataaggagtaaatcatgaataaaggaaagatcatacaggtaatgggacctgtagtagatgtggcttttgaaaatggaaaccttcctcatatccaggatgcgctgactgtaatgaacaatggaaagcgttgcgttatggaagtagcccagcatattggcggagatgtagtccgctgtattatgttagcttccagtgaaggtttatataaagatatggaagtagaagcaacaggacagggaattgctgttcctgttggtgaaaagacactgggacgtctgtttaatgtccttggggacaccttagatggcggtgagagcctggagggagaagaaaaatgggtcatccacagagatcccccaagttttgcagaccagagcccggttgtggaaatgctggaaacaggtatcaaggtcattgacctgttagcaccttatgcaaagggcggtaagatcggtctgtttggcggtgccggtgttggtaagacggtgctgatccaggaactgatcaccaacattgcaacggaacacggcggatattcgatcttcaccggtgttggagagcgttcccgtgagggaaatgacctttggacggaaatgagcgagtccggcgttttaaagaagacagcccttgtatttggacagatgaacgagtcaccgggtgcccgtatgagagtagcagaaacaggactgaccatggcagagtatttccgtgatgtaaagcatcagaacgtgcttttattcattgataatatcttccgttttgtacaggctggttctgaggtttccgcccttcttggacgtatgccttctgcagttggttatcagccgacactggcaacggaccttggcggacttcaggagcgtattgcttctacaaagaatggttctattacttctgttcaggctgtttatgtgcctgcagatgacttaacagacccggcgcctgctactactttcgctcatctggatgcaactacagtcctttccagaaagatcgtagaacagggtatttatccggcagtggatcctctggagtcttcttcccgtatcctggaagaggatgttgtaggaaaagagcattatgaagtagccaataaagtaaaagagatgctgcagaagtataaagaactgcaggatatcatctccatcctgggtatggaggaactttccgaggaagataagctgacagtcaaccgtgcaagaaagatacagagatttttatcccaaccattccatgtggcagagaactttaccggtgttccgggaaaatatgtacctgtaaaggaaacggtccgtggatttaaggcgatcattgacggagaaatggatgaatatccggaagcagccttctttaatgtgggtaccattgacgaagtagtggaaaaagcgaaggcgatgcaggaaggagcgtcataatggcagcattctggcttaaggtcatagccagtgaccatgtattttataatggaaactgcgagtccctggtggttccggctcatgatggggaagtaggtatccttcctcacagagaggctatgatcctggcaatccaggaaggagaactgcggtttcgcgttcccggggaaaaccagtaccgggaagcggttgtaggtattgggatcgtacaggtagcaaataaccgtgtaacggttgtagtagatacagcggaacggccggaagatattgacgaagtccgggccagacaggctttggaacgggcccaggaacagcttcgtcagaaacagagtatcagagaatattatatgtcaaaagcatccatggcccgtgccctcagccgtctgaaagccagccagcataagggcagtgaataccatggattataatagatcacattatagatcacataagcagcgcgccggaaggtacgctgtttttgcgttatatattttttatagttacagccagttgttatgttctaccagaaaatcgcagaaatcagctacaatagggcttttctttcctttttcggaccgggtcaggatgatctggcggcggcatttctggtctgtgatgggcagaagttttaccggaaaatgaccaggcgaaccaccaaaattagtagtaagaggtccccatgagcaggcaggccagaaaccgatgcccattcccgctgcgatcaggtttcgcacagactccgtagtgtcgctttcaaagatgatatggggagtaaagccagcttccataaaatagctgtttgtgatctggcggatgggcttggaaccgccaaggcagatataatcggcatcttttgtgtctgttaaacggatggactccctggatccatagggagaatgggatggcactgccagatacaggtcttcttctaacataaccgtggcatcgtcattttcctttggggcagtatcggctctccgggctgtaacacatacgtcaaaatcgtcttcctgtcctggtatctggtacagctggaaatttacatccgggcggaggcttctgtaggcaatgatccggttggtgatcagggcagaggcagaaaggagacgaagatgtacagtgtgggtggcagcttcctttccttttcgcagttcctccggcagccggtctaagctgcttaaaatagggatcagccgtttttgcaggaattttccttcatcatttaattcaatgctgcggttctttctctcgaacaggggaacacccagttctgcttccagcctgtggatggcctgggaaagagccggctgggcgatctgtaagtgttctgctgcttttgtcatatgctggtactgggccgcaactaaaaaatatcgtaattgtagtaattccatgatgcacctcttcatttgttgcaagtcttaagtatttcataagcagttctattataagcaaaagggggaaaatgtcaaatttatatcgaagacactaacaaaatgcgctataatataatgagcgcagggaaatcttcaaacgcgttgctaatgcgtttttgatatgcatggcaaaacaagcaactgcaaagcagaaaggggaatataaatatgaaggaattattgtttatgaaaccggttttcaaagaagctgtctggggaggcagaaaacttcgggatgattttgggtatgagataccaagcgacagtaccggggagtgctggggcatcggagcccacaaaaatggagactgtgagatcgcagaaggcacttataagggagagcatctgtcaaaattgtgggaagaacatccggaattgtttggaaatgaagatggaaaatatggaaaagaatttccccttcttattaagatcattgacgccaaatctgacttaagcatccaggtacatccggataacgcctacgcaaaagaacatgaaaacggctctctgggaaaaacagagtgctggtacatcttagacagtgagccgggaacccagatcgttatcggccatcatgcaaaagacaaagaagaattaatgcagatggtagaggaaaagcgctggaaagacctgatccgtgaagtgccggtaaaaaaaggcgatttttatcagatcgatcctggctgtgtccatgccatcaaaggcggtactgttattttagagacccagcagtccagtgacattacttaccgtgtatacgattatgacagaaaatggaacggaaagcttagggaacttcatgtaaaacagagtctggatgtgatcaaaactccattccagcctgcaaaggaccagagaagcatcacccatacagaaggagctgacctggaacatctggaaacatgcccttattatacagtagaaaaatacgatatccacggaacctgggaccatgtttttgaggctggttttgtaaatgccagtgtgattgaaggagaaggaagcataaacggcagaaagatcaaaaagggagatcattttatcattcctgctgattttgggacctgctcttttgagggtaacttaagcctgatctgttcctgggtataaagtgctatattcagctgtgacagtaaaataagttgctttttaaactaataggtgataggatagctttatatcgagttaagagcaaatggtgctctttgtttatggaccagccgctgaccagcggtcgtgtctatttataaagaggtaaaagggaagcaggggaagtacctgcgcgatctcgtcactgtaagctgtaaaggagatccggaaagttatcatccagatcccatgcatataaaacgtggatagaaaggacagaatatccgccactgggaaaccgggaaggcagttttgtatgtagaaagcagcaagccaggaaacctgccatttgttggtacaggagaaggttcattccgggtcacgagtaattgatcgtgccggtcctgaaagatgatcatggcaattgttccagtcgtgttatcatggatcaggatttctgactcacacaggaaaatggactcctgcgccctgccgggaatttcttccggatcgatacatattattatgtgtcttaggacaaggaggaaaatgaaaatgaagttgaaaaaagcaatgctgcttttcgcagcggcagcagtagctgcaggtaccgtagcaggatgctctggaagcgcaaaggagacaacagccgcttctgtagcagagacaaatgctgaggaaacaaaagaagagaccacagcagaggagacccagaaagagaaaactgctgctgaagaagaggacgaagaaaactacgatacaggagatgcagcattggacaacacaagaaatcaggatgagatcggagaaaaagaacttttagttgtaagttttggaaccagctacaatgacagccgtcgtttaaccattggtgctattgaagatgccatcgaaaaggcagagccggatttttccgtaagaagaggttttaccagccagatcattattgaccatgtaaagaagagggatgatgttactattgataatgtaacagaagctctggaccgtgcagtaaataatggtgtaaagactctggttgttcagccaacccatctgatgaatggtcttgaatatacagatctggtaaatgaaattgcagaaaatgcagactcctttgagaaggttgttgtaggtgaaccattacttacatccgatgatgactttaaggcagtgatccaggcaattacagacgcaaccaaggaatatgatgatggcgagaccgcgatctgctttatgggtcatggtacagaggctgactccaatcaggtatatgccaagatgcaggatatgctgacagaggaaggctttgagcactactatgtaggtactgtagaagcaactccaagtctggaagatgtagtagcaaaggtaaaagaaggttcctataagaaagttgtattagagcctttaatgatcgttgccggtgatcacgcaaacaacgatatggcaggtgatgaagaaggttcctggaagactacttttgaagaagctggttatgaagtaacctgcctggtaagaggtttaggtgagttagagccgatccagcagctgtttgtagaacatgcaaaggcagctgttgacagtcttgcaaaataatcgattttgcattaggatgctaagttaaaataaaaaaggcggtcagagaaaattctggctgccttttgttgcaatgcatatgggaaatgtgccggtgatgtgtccggcagtggacctatagacagtgagaaagatggtaaaaagatgaaaataagaaaatatatactgtgtgccgggatcgttggtttagtggggatgtcttccggatgcggacaaaagacagacagcggggcaacttcccaggctgtaagcgaacaggcagatacaaaagaaaatgcagaaacatctggtgcagcaggtgccgaaacagaaaaagaaacggctcctacagtgcaggtagtaacagatgatatggtgcctgttgaagcagatgcattaaaagacggcgtttatccggtagaggtggactccagctcttccatgttccacattacagaggcagaactgacggttgctgatggaaagatgagcgcaaagctgaccttaagcggttccggctatggaaaagtatttatgggaaccggggaagaggcagaaaaagcaggggaaggagattacattcaggcagaagagagtgcagatggaaagaatgtatttgagatcccggtagaagccttagacaaaggaattgactgtgcagcttacagcaaaaagaaagaaacctggtatgacaggaccctggtagtccgggcatcttcccttccaatggaagcctacaaagaggggaacatgaaaactgtggaaagcctgggcctggaagacggaacatacacagtggaagtgaaactggaaggcggttccggccgtacaactgtggaaacgccaacgcagttaaagatccaggatggaaaggcaacggctgtgatcacctggggcagctctcattatgattatatgaaagtgggagaagaaaagtatgagcctgtaaatacagaaggaaattcttcctttgagatcccggtcactgtttttgaccagaaacagaaagtgatcgcagataccacagccatgagtgtgcctcatgagatcgactatacactgatctttgactctgaaagtattcagccacagtaacgggcaggcagcagatcacaggaaagaaagatgaaaaaacagataaaaaagaaactattaaaaggatttcttctgggaacgctgactgtctgcgttctgggaatgtgcgctggatgcggacaaaagacagaaaatatagagaatacagttacttcccctacagcacaggagcagacaggaaaaacggggcaaaaatccctttcctggtcagaactaacgcagacaggaagtatggatctttcatatgcggatcagttttctgtcacctactatggggaagaaaactatgccctggtcattattggagaagatgaaaaattcctggtagtgccggaaggagagccggtaccagaagatctcccggaagatattacaccccttttgcagcctttaacgaatatgtacctggcagctacttctgctatggactttttctgccatttggatgcagtggatcagatcaccctttccggtacagaccgttccggctggtatttagaggaaccgaaaaaagctctggaagagggaaccatggaatatgcaggaaaatacagcgctcctgattatgaacggatcgtagataagtcctgctcccttgccattgagtctaccatgatctatcattgtccacaggtaaaggagcagctggaaaatctgggagttccagtcctggtagagcgttccagctatgaggcggatcctttaggaaggatggaatggatcaagctgtacggggtacttacaggaaaagagcagctggcagaggaattatttgaaaaagagatcaaagaactggaaaatgtttctgttcaggcggatgaaggacaggaacattcggatcagacaaaccagggaaaaacagtagcctttttttacattacatccaagggcagtgccaatgtgcgtaagccgggagattatgtggcaaaaatgatcactatggcaggtggcacctatgttccccagagtgcagaggaagaagaggaaaacgctctttctaccatgaatatggaaatggaagccttttatgcaaaggcaaaggacgcagattacattatttataacagtaccattgacggtgaactgaccacaatggatgaatttcttgcaaaaagcccattgttagcagattttaaggcagttaaagagggacatgtgtggtgtacaggaaagaacctgttccaggagactatgggactgggaaatatgatacaggatattcacaggatgctgacagaagagacaccagatgaaggacagatgcattatatccatcaactgaaataagaaaggggaaacacaggttgaagaccagagaaatgacgggaacagcaaaaaagcggatccatattgcagggggatttttactcctggttgtggcactggtcctgctttttttctggaatatttattccggaagtgtaagtgtagaaccgaaagatgtgctgcggcttttgtttcagggaccggatgaaagtacccaggcaaggatcctctgggatatccgtttcccaagagtgctggcagctatgttattaggcggcgccctgtctgtttccggatttctgcttcagaccttttttgcaaatcccattgcaggcccctttgtgctgggaatttcttccggtgcaaaactgatgacagccctggtgatgatatttcttctgggaagagggctggtggcaggttccgttgtattgattttggcatcttttattggtgccatgctttctatgggttttgtgatcctgatcgccaataaagtgaacaatatgtctattcttgtcatctgtggtattatggtcagctatatctgttccgcagttacggatctggtagttacctttgcagatgactctaatatcgtaaatctgcataactggtctttgggcagtttttccggcattacctgggaaaatatttcggttatggcagtggtgctctttttttgtatgatctgtgccatgttgatggcaaaacctgcaggggcatatcagttaggagagatctatgcagccagtatgggtgtgaacataaaggcgtttcgcctggcactgatcctggtgtccagtatcctttctgcctgcgttactgcttttgcaggtccggtctcctttgtggggatcgctgttccacagctggtaaaaagcctgtttaaaacaacaaagccgattattatgatacctgcctgctttttaggcggggcagtattttgcagcttttgtgaccggcttgcaagaaccctgttttcgccggtagaattaagtatcagtacagtaacagctgtgtttggagcgccggtggttatttatatgatgatacagaccagaggaagaaggtgacaggatgatggcagaagaaagaagcagttcttatatttgtgcggaagatataagcgtaggttatcataacctgccattgatccaaaagataaaccttcatgtaaacaggggagagatactgactctcataggaccaaacggcgcaggaaaatctactatattaaagagcctgatcggtcagctgaaactggtaaaaggggcagtgtggctggatggaacctctatggggaccatgaaggaaaaagagattgcccttcgtatgtctgtgatgatgaccggtcgggtgaaaacagagcggatgacctgtgaagaagtggtaagtatggggcggtatccttatacagggaaaatggggatcctgacagaaaaagactggcagatcgtaagggagtctttagaactggtccagggactggaactggcagaaaaggactttgaggcggtcagtgacggtcagcgccagagagtccttcttgcaagagccatctgtcaggaaccacaggtcattgtattagatgagccgactgcatttttagatatccggcacaaactggaacttttgtatcttcttaaaaatatggtgcgggaaaagaaagtggcagtgcttatgtctctgcatgaactggatctggcccagaagatatccgatcatattatctgtgtaaaaggggataattccattggccgctttggtacgccggaggaaattttcagtggagattatatcaaagaactgtttcagatcgaaaaaggcacctatcttacagattatggcagcgtagagttggaagctgtaaaaggagagccgaaggtgtttgtcattggcggaaatggaacagggatcccggtgtatcggcagctgcaaaaagagggaattccctttgcagcaggtatcctgtgggaaaacgacagggaatatccggtggcagaggcactggcttctgtggtgattcgggaaaaagcctttgaatcggtctcagatgcgacctttgaaactgcggtaaaggttcttaaaaactgtgaaaaggtgatctgctgtatggaaaacttcggaacttaccaggaaccttgcagacagttgtggaaaatagcaaaagatcttggaaaaatttgacttctatgctcacttttgttaaacttttatcagctgacaagtagacaaaaaagtccgccagacaaaaaacgagagaaaagaggacttaaaaacatggagaagtattttccggaactgaacgagaagtacaggaagaaaaattatcccgatggtgtatttgcaagaatgcataagaacacagcaaaagtgtcctggctgcaatgtggatcatgaacaaaaataagacatatcttgcagaaggtgatgcttcctttacaggcatggtaaatgtgatggccggtgtctgcggggcttcttcttcgctttgcgctgcctctttttataggaaatctgctgcagcagttttacaatctggcagatacttccatagcaggccatatgttaggagaccaggcactggctgagatcggcgcaacggcagttctttatagcctgatcaccaactttgctttcggtatgaataatggtctggctcttacggtcagccgcaatttcggtgccggaaatgaaaagaagatgaagcaggaagtctgctggatgactattttatccattggaactgctttggtactttcagggggctttctgctgtttcagaaaatacttctggaactgcttaagatccctgaggaaaatatgacaggaggaatgacattatgccatgtacaactatattagtaggaaaaaaggcaagttatgacggttctaccatgatcgccagaaatgacgatgcaggcggtaatcattttacagcaaaaaaatatgtgatcgtacatccggaggagcagccgaaggtgtacaaatctgtgatctctcatgtggagatcccgcttccggagcatcccatgcgctacagcgcagctcctaatgccattcccggacagggaatttgggcagcctgcggtgtaaatgagaaaaatgtggcaatgactgcaaccgagaccattacctccaacccgagagtcctgggtgcggatcctatggtagtgtaccagccggcagaagacggaaaggcagaagttccaggtggtattggagaggaggatatcgttgttcttgtccttccttatattaacagtgccagagaaggtgtaaaacgtctgggaagcctgttggagcagtatggaacttatgagaaaaatgggatcgcttttcaggatgcaaatgagatctggtggcttgagacgatcggcggacaccactggatcgccagaagagtacctgatgacagctatgtggtaatgccaaaccagctgggactggatgtatttgatctggaagatgccttatttgagcagaaggaatatatgtgttctgcagatatgagggaatttattgaagaaaatcatctggatctgtcctttgatgactgctttaacccgagggatgcttttggcagccatgaggactctgaccatgtatacaataccccaagagcctggttcggtcttcgctatttcaatccccataccatgaaatgggagggggaagacgcggactatacaccggagtcagatgatctgccatggtgcatggttccggaaaagaagatcacagtggaagatgtaaaatatgtgctgtcctctcattttcagggaacaccttatgatccatatgcgaagcactctgacccggtataccgcaataaataccgcgctatcggcatcaaccgcaccgatctgctgtcactgatccagatccgcccttatatgccggaggagtttcaggtgatccagtgggttgcctttgcttccaatccatttaatgtattagtgccattttatccacaggtatcaaagacaccggagtatatggcaaataccacagcagaggtttccactgagaatttctactgggccagccgtatgatcgcagctatggcagatgcagcttatgcaaagacttctatttatattgagcgctaccgcctggcagtgggatctaaagcccatgcactgatcatcaagggagataaggcgcagcaggcagcaggcacgccggaagaaaaagaaaagatccgggaagagatcaacgaagaaatggcagctatgttaaagaaagagacaggaaatacactgaataaggtgttatttgagctgagtgcttctatgaaaaatgccttttcaagatcagatgcataaaaattagtaggaagcgccctgggatatgtaaaaagcatgttccagggcgctttttatgttccggggtacattcatttttcagacttcaatttgcaaaaatcatacatttcctatacattttcctggtagtagattttacatggcttttttatactaaaaccatgatcagaataaaaaataacaaaaagtaatataaaagaaagggaatggatatgaaaaagagaagaattgcagcaggacttttagcaggtgtactggtgatcgggggacagcaggtatgggctgctaccacacattacaatgactcatctgtaaccggcggatctgaacagtggcagaagtgggtagcagactggaaccagacagctacagattttacaaaggtatcattaacacctggcggcgcagcttccgaactgaattttgcatggtacagtgaaggaaacgatccaacacctgttgtttattttggaacagataaggatgatcttaaagcctgttcaggaactgcaagcagtgtagatccatctcttacaggtggaaaaccttacagctacaactatgtaactgtaaacggtctgaaagaaaacactacttattattattctgtagaaaagagcggtgtgagaactcctgcggaagtttataaaacaggaagttttgaaaatgtaaagatcctttatgtaggcgacccgcaggtaggtgcttctaagggacagcctcagggagaaggaaaattaagtgctgactccggcgctgccaatacagcagcccgcaatgacggttttgcatgggaccgtacactggatgcagctttagcacagaacccggatctgaattttgtgatctctgccggtgaccaggtaaataaaacaggaaagccaaaggaagaagagtatgcagcttatctttccgcagatgctttaaagagccttccggtagcaactaccattggaaaccacgactctttaaacaaagattacagctatcattttaacaatccaaatccgactgatctgggaatgacagaagcaggaggagattattactacagctatggacctggccttttcattgtattaaatacaaacaactacaatgtagcagaacatgagcaggccattcagaaagcagttgcaaacttcccggataccaaatggcgtatcgtgaccatccatcaggatatctacggctccggcctggatcactctgatacagacggtatgatccttcgtacccagttgacacctgtatttgacaagtatgatattgacgtagtccttcagggacatgaccatacctacagccgttccaaaatcctctatggagatggaaagtcacatggctcttatgaattcagactggatgaaacaggtctggactatgactgggatcatgcttacaacaacaatacaggggagagtattactttaaatcctctttcatctgatacagctgctgtagaagcaaaagatgcttttacagcagacaataagtgctataccattgaaagctccggcaaatccgttgtgaccaaccccaagggaaccctttatatgacagcaaactccgcttccggttccaagtattatgagcttatcaattcacagcaggattacattgaagtaagaagccagaactggctgccaagctactctgtgatcgatctgacaaaggatgatttcaagatcactacttaccagatcacagatgaaggaaaggtagaaaatattgataatacctttaccattcacaagaccgtaaacagataagcccaaagccggcaataaaaggtataaaaaagatataaaaagacataaaagatcaaattccgtcccgcgaaagctgcaaaaagccttgcgggacgttgatcggatagatcgaggcagtaaaaatggatcaggcactgaaaaaacaggtaaaaaagtacgcagttatgacagtgatcatggtgatcatggcactggcagtggtaaaactgaataacgtaactaagacacagctggtcaaccgcacagggcagacttttgagacaggaaaagtggtccgtatcctggaagacaacattcaggaagacggaatgcgtgtggggcagcagactgtagtcgtaaagatgacgagtggagtgaaaaagggacaggaacttacaactaccagcagtgcaggctatctttttggtgcagcctgcaaagtgggaatgcgggtagtggttctccagagcgttgcaggaaattcagtgatcacaagcgtttattccatggaccggaaagaggtaatgatcggttttgtggtactttatctgctggcattgtgcctggtaggcggtctgcagggcgtaaaaggtgctctgggactgatctttacctttggagccattctttttatttatcttcccgtagtctatatgggatattcacctttctggacagccgtatttatatgtgccattaccaccgcagtgaccatgtaccttataggcggtgcttctgaaaaaacagtctgtgcagtccttgggaccatatcaggagtccttattgccgggatcacagctactgtattttccagattatcagggatcacagggtggaatgtatcagatatagaaagtcttcttactctttatgagaccaatgatatacaggtaggcggactcttattttccggtcttctgatcagtaccttaggggcagttatggacgtagctatgtctatttccagtgccatgaaagagatttatgaccagaaccaccagattacccgcatgcagctggtgaaagcaggaatgagagtgggccgtgatatgatgggaacagattccaatacgctgatccttgcttttgcaggcagcagtatttccatgctgatcatggattatgcctatcatcttccttatcttcagattattaattccaataacatcggtatcgctttgatgcagggactttcaggaagtttcggtatcgtattaagtgttccggctacagtggcattcgccgcatggatctatacaggaagaaaataagatagatcattttgtttaaattattttttatatatcgttgccctttgaaaccgatagggaagtagcatattcttttaagatctccacatagtctcttgcatgctgggaaaggtatttctttttctggtatgctacaatggttgtggtaagaaccggtttctggccaatggagaagcagcatccttccgggaaaaaccgggattcttcccgaaaataactttccggtgcaaaagcagctcccagtccctgaatcgcaaggcggatggacatggcactgtttctggtgtgaaggagtaccgttggctccatagagtattctttaaataaagactgtgcgataccaccggtattctggtccgggtataacaggataaaattttctttttcaagcattttcaagtccagccatgggtggcgaaagccttcctttggctgggctttttcacataaggggtggtttttatttaagaccagtacgatctcttcttctcttaatatctgataatccatattttccggaaatttatgtacattatagatcgtcaggtcaatggagttgtcctccaggctgttttccgcaacgaaattaatagcttccataatgtttaaggtaacataaggatagcgcttgtgaaagcccataagggatggctcgatgagagtagtacccatcataatgggtgcggcaatatttaagcgtcccttttcctggtgggcaatgtcatcaaattcctggctccactggtccccaaaggcggcaatgcgctctgcgtagtagagatagcgctcccccatgtaagtgggatagtagtggttttccctgcggtcaaataagggagcgcccaggcgttcttccaggttttttaaatatttgcttaaagagggctgggaaatatacagggattctgcggcttttccaatgctctggtgttttgcaatggcaagaatatagcgggcttcttttaattccataggtgtcctttccaaatttatattatagctttactgcataaaaattatagaaaatatatatttgacttatagtataccactttctataatgtatgtgaaatatataagtacatttcattaagaaataaatatttattatgtatgctaattaatatttatcagagaggagaaacaaaaacaatgaaaaagagcagtgcatggtttatgctcacaccgggactggtgatcctgtttttatttctggcgatcccgctgcttcgggtattgtttccaagtatcttttccggagcatatccctttgatgcctatgtgggatttttccaggatgagtattacaggaaaatctttatccgtactgtaaagatcgcagtgatcactacctttgtctgcatggtgggcggtatcccaaccgcttattttatcagccggtgcagcaagaaatggagagggatcctccttgcagcttccattttcccaatgatgaccaactctgtaatacgaagctttgcatggatcaatatcctgggaagcaacggcattatcaacaaagtgctggttggactgggagtggtgccaaagccattaaaactgctgtatacagacttttccattatcattggttctgtgtatctgtttcttcctctgatgatcgtaacagtagcaggtgttatggaaaatattgacgatgacatgatggaagcagccttaagtcttggggcagcccgtatggaagcttttatgaaggtgatctttcctatgagtcttccgggtatcatcgtaggaggcatcctggtatttaccggaacactgactgcttatacaacgcctcagttattgggaggcaactccaacatggtaatggcgaccctgatctatcagcgtgccatgtccgtcagtgactggaccggtgcttctgtgatcgcgctgatcatgatcgttgtaacactggctgtgatccggggctttaatgctctggcagctaaactggaccggagaggtgagaattatgcgtaaaaataaacttttgaccatatgggcagtgctggtatttgcgtttcttgctattcctctgctgatcattacagtaacagcctttggaggcggcagcgccattacatttcccattgagtctttttcattaaaatggtttgccaatgtattcgccttaaaatccttccgccggtcctttatcaccagcctggaagtggcatttctggcaacttttatctcccttttggttggtattcccgcagcctatgccctggcaagatccggcatgaaagggagaggacttttaaaatccattttcctgtcacctaccattgtgccaggtatcgttatcggctttatcatgtaccagtgcctgatattaactttaaggatccctgtatttacaggacttttggcaggtcatttcatggtaacactgccatatgtgatccgtgtggtaggttcttccatggagcagtttgatttttctattgaagaagcagcctggagtcttggatgtccgaagaccgccgctttctttaagatagtgcttccaaatgtaacaagcggtatttcttccgcgtttatgctggcatttatcaattcctttaataatatcccggtatccatgtttttatcaggtcctggcgtgtccaccttcccgtcaaccctgatgaattacattgagtacaactatgatcctacagtttctgctgtatccgtacttttaatggcagcgacggttatcatcatggtcgttgtagaccgtacactgggtattgcagctctggcaaaataagttacaggttataacagcgccggtcaggcggataaaggagaaaatgaaaatggcatttatgagtttaaaggatattgatgttagttacgataagaaaaaacagatcttaaagggcttaaacctggatgtggaaaaaggagagctggtgtctttacttggtcccagcggctgcggaaaatctaccactcttcgtgtagtagcaggttttattgatccacagggcggaagctttttactggatggggaagatatgacaaaggttccggtccacaagagaaatttcggactggtatttcagagttatgcattattcccgcatctttccgtgtatgataacgtggcttttggccttcgcaccagaaaaatggataaggaactgatcgataaaaaggtaaaggatattttggaagtatgcggccttagcgacctggcaaaccgcttcccaagacagatgtcaggtggccagagacagagagtggccttagcccgttccttagttattgagccaaagcttcttttattagatgagccgttatccaatctggatgcaaagctgcgtctttccatgcgtgtggaaatcaagcgcctgcagaaaaagttaggtatcacaactttatttgtaacccatgatcaggaagaatgtttctctatttccgataaagtggcagttatgaatggtggtgttatcgaacagtatgacacaccggaaaatatctatcgcagacctgcaacggagtttgtagcacgttttattggatttgagaatttcctggatgtagagaaaaaggcagatcatttatatgttctctcagatggaactgcatttaagacagccatggatttagacggcggggaatatgcggcaaccatccgcccggatgatatccgtctggcagatgataagttttccgaaaatgtactgagcggcaaagtaggtgttcgcaccttccttggaaagagttatcagtatgaagtagagacagcagccggtgttttaaaggtaaatatgggtacagaccatgtatttaaagagggcgatatgctccgtctgtatcttccagaggataagctgatcctggtgagaagataaatacaagattaagtaagatccggcattaaaaagcatttacgtaaaaatctttataaatctttatataaaaggagaattattatgaaaaagagattagcagtagtactttgtgcagcaatgatgttatctgcatgcggcggcgcatccacctccgataagacagcagataccaagggacagacagcagcagactccaaggcagatgctacggaaggctctaagggagatggaaagctggtcctttctacttacggactgagcgaagatatttctgaagatgaagtatatactccttttgagcaggaatttggctgcgagatcgtaacagaaacaggcggtaccaatgaccgttataccaagctggcagcagacagcgagtcttctattgatgtgatcgaactttctcaggctatgactgcaaagggcgcagatgagggacttttcgataccattgacttaagcaagattccgaatgcagaaaacctgatcccggctgcaaaagagctggctgaaaatggacagggtattccttacaccatcaacagcatcggtatcatctacaatccggaactgaccggctttgagatcaagagttttgatgatctgtgggactcccgcctggaaggtatggtttctattcctgagatcacaactacttttggaccggctatggtttatgtagcaggtgaccatgcaggtactcctgtagcagaggatgaaggaaaagcagcttttgaagcactggctgagttaaaaccaaaccttgttaagacttatacaaagtcttctgacctgatcaatatgtttacttctggtgaagtagcagcagctgttgtaggtgatttcggtgttcctactattgtagcagcaaacccggatctggtatatgtaactccagaggaaacttacgcaaacttcaataccattaacattaccaagaactgcaagaacaaagatctggcttatgagtacttaaactatcgcatcagccctgaactgcagacaaagactggtaaggcattaaatgaggctcctaccaacaaggaagttacctttactgaggaagaagcaaaggatatgacctacggcgagactgctgacaacgcaaagatcgtagattattctttcgtaaacccgatcttaaacaactggatcgaccagtggaacagaaccatcaatcagtaggagaaaatatatgaccgctgatcttattattaaaaacgcaaatgtctttatgacctacagacagtgttttgaaaagcgggatgtggcagttgcaggggaaaagttttattgcgtttcccctgcaattgtttatcctggggtaaagaccattgacgcccagggaaaatatatgatcccggggtttatagacatccacatgcacattgaaagttctatgacaactcctgtggaattttccaggaccacacttccctatggagtgactaccgttgtggcagacgcccatgagatcgccaatgtatttggcatggaaggcataaaaagctttatgagccagaaaacggagcaggatattttctgggcgatcccttccagtgtaccggctaccaatgaagaactggagacaccgggagctgctctttatcctgaggatgcgaagaaaatggcttcggatccgggggttctctgtttgggagagattatgaattttaaggatctcagtgctgacgggtacagtaagaccagggaaatgatccggctttgcaaagaagaggcgccgttgatgcgcattgagggtcattgcccgggactttcgggagaggatctgaaccgctttatctatgagggcgtagatgcggaccatacccagcagaccccgcagtcggtattggaaaaaacggattttggcatgtttctggagctgcagcttaagtctttgcggcctgaggtggtaaaggtggtctgcgaaaatcagctgtatgaaaatgtagctctggtgacagacgataccatggcagataaactggtaaagagccagttaaacgggatcgtaaaggcagccattgaggctgggatgcctgtagaaaaggcaatttactgtgctacctggacacctgcaaggcggatgcatttagatgaccgtggtatgatcgcaccgggaaagatcgctgattttgctcttttggagtctcttaaggacatgcagccggttatggtatttaaaaagggatgctgtgtgtatgaaaagggtgcgttggagaaagggcaggcagatatgcaggcggaaattcaggaacaaaggtccctttctgtgggagattttccagagcatttttatcattcggtccagtgccgggaggctgaaaaagaggattttcagatcaaagcggaagatccgtcagctgcatttgcagaagtaaatgtgataaaaatatcagattttggtacggctaccacaccggttaaaaagagattatccattaaaaatggaaatatctgctggaaggaagcaggactttccctggcagtggtttatgagcgatatgggaaaaatggaaatgttgccaaagcactggtggaaggtacttttaaggagccgggagcagcagctactacctggtcccatgacagccacaatcttcttgtaatgggaaataatgaggaagatatggaacttgcccagaaacgggtgagagagcttcaggggggctatgtggtgtatgccggcggaaagctggcggcccaggccactcttcctgtaggcggtattttatcggatcagcctgtttctgtgttaggcaaacagctgggacaggtgcgaaaggccatggaagatctgggctatgacaacaacaatgtgatcatgtctatgtctactttatgtcttcctgtatccccaagactgaagctgacggatttcgggctgttagaggtgaagagccaggagaaagtgcctctgatccaaacttattttgataaaaacggaatgaggatctgaaagtgaaaacgatcattcaaaatggaattgtagtgaccatggaccagcagatgcaagtgtgggatcatggttatgtgataatagatggaacaaaaatcgtggaaacagggccggagagtgaactggaattaaaaaaagcggctctggcccgggtgggagaaaactggcaggaaaaggatgcacgcagagggatcattatgccgggaatggtcaacacccacagccacttagggatgatcccgttcaggggactgggagatgactgcaaggaccgcctgcgggtatttctgcttcctatggagtcgcaggcaatggatgccgaactggcagcagcatctgccagatacggtatctgtgaattgcttctttccggtgtgaccacagttcttgatatgtattattttgaagaaaaagtagcacatatcatggatcaaatgggaatacgtggaattgcgggggagaccgtaatggaagatgctacctgtgacgcctcctgtgcagaggaagcgctggaacggggccgggacctgatccgggcttacagaaaccacccaagagtgaaaggggcgctgactcctcatggaaccactacctgcagcggggaacatatgaaaatggctctggaagaagatcttaagggaaatacggtatttacactccatactgcggaaatggattacgaaatgacgtatctggcagaaaaataccagatgacaccggtggagtatctgaattcttttgaacttttgggagcgcatacgctgactgcccacagtatccgcctgacagaagccgactgcaggctgttagcagaaacgaaaaccaatgttgcccactgtatcggttccaacaccaaggcagccaaaggagtagcgccggtggctctgcttcgcagcctgggggtaaatgtaggtctgggcacagacggaccagccagcggaaacactctggatctgtttacccagatgcgtatgtgtgaaaatttccacaaaaacaccttaaaagaccgaagtgcttttcctgcaaaagagatcgtgaaaatggcgacaattgagggagccaaagctttgggattgggagatgtgaccggttccctggaacctggaaaagaggctgatctggtaatcatagaaaccgactcccccaacatgttccccatatacgacccctactccaccctggtctacagcgccttcgcctccaatgtacgggatgtgtatgtagccggagaatgcctggtagaagaaaaacggctggtaaaagaagatctgatggatgtccggatggcgttaaaagagaagatggaacggacgaaatttaaggaaatgaaggctctgacctgatgggttggagtctttttctatgatagaatagcaaaaagccgcctgttttggcggcttttagtatgtttatggttgtatttacttacttaatacggatacaaattccacttttttatcaatcgcatccccgattacaccaatggtctttcccatggtaaaggctgctgctactgtaccaattccaaggccggagatatgtccaaggcagaggaaggtcatgcaggcggtaacaaaaagacaggttacgtcaaaggtgatcttgactttggaataaggctttttaataatctcggagagatctcttgggaacaggtcggttgggatgaccgggagtttgcagcggttggaaagggcgataccgaagcagaggatcagatagcttgccacaaagtagaacacccgaaggggaatggtaagtggcagtgtgttgatccagatctcatgaatatctaccatttttccaaaggcaaaaccggctacgaaactaaataggtagctgggaacaaagcgtttttttaagatcatcaggcttaaaacaagaagtccctggaaaatataggtccaggtgccaagggtcaaagccggaaatacaagggaaaatgcgtaggggacgctggaaatagcggaaatgccggagccggagcgcagcattaaaacaacgcccatgctgttgatgaggataacgatcagcagggcaagttctccgcggagggtgacttttttctgattcataatgattactctcttttctttttgtaaattgatgaaagttaaaaaatatgtacattcacaaagtttgtttgccatttttataacagaacaaactttgaaaacacataaaagggggatgcagcgaaacattttattttgcaacatccccgattatactcttggtttataagattttcaagaaaattgtgttacagtcttattccccatctttcagactctgcatatactggtgcatagactcggcaactattttactgtgagcaactgcctcaaccacagtacgtgcgccgttcacaacatcaccggaagcaaaaatacccgggcgggtggtatgtccggtctcatcggctaccaacaggcctcttttatctgcagccagaccctgtgttgtgttgacgatccggttctgcggtccctggctgatagaaataatcacgctgtcagccgggaagaaatgagtggagcccggaacgtcagtaaaggtgccgtcttcattttcaatcacatctttaaagataacaccgtcatctttgatctccacaggagccatattgtactcaaactgaacgccctctaactgagcataactgaactcatgcttgcttgcagccacctgttttgtgatagagaagcaggtcagctcctgaacacccttgcgtatggcagttcttgcaacgtccatagctgcgtttccggcaccgatgacaatgacacgttttcctaactggtagctgtccggattgtttagataattaatgccgaagtgaacatttcccagagtttcccctttaatatgaagggcgtttggcttccacacgccggttcctacgaaaatggccttatagccgtcacggaacaggtcatcaataccgatggcgccgccgatatgtgtattcggacggaatttaatgccttttaagtctaagtggcggtatttaaaatcatccaggacagattttggcagacggaattccgggataccgtaacgaaggacaccgccaactttatcttttccttcaaaaatagtaacatcatagccatatcttgcaaggatgacagcaatggtaaggccggcaggaccggaaccgatgatagcagcccgcataccattggaaggagcaggtccctgggtcattttattggcataagttgtggaaatatagctttcaatggtagaaaaatggaccggagcacccttacgtccgagaacgcagtggccttcgcactggttttcatggttgcatacaagactgcatacagtagtcagcggattattttcaaaaagcattttacctgcttcatctaatttatttgcctttaaaagtttgatcacttccgggatgggagtgctgataggacaccctttctgacactggggaaccttacatcccagacaacggtttgcttcatccataacatgtaatgccatttacaaaacctccatactcatcataaatcttagttcatacatttttctggacccattctatcacagattactttttgtgaccagtgtctaaaacaatgtatttaattctataacgaatgataaaaaatgcacaaaaatgtgataaaaaatgcacaaagataagttgcaaaaggaaagaatgaaagaatttcgtcagaaatgtgtaagttggaaaatggaaaggcctgtgttatactatgtttgaggagatacaacgagaggaagatcgttatggataaaaaatttttaagacacataagcagcatgatgcttcttgtctgtacgctggcagcagtcagtcctgtgaccgcttttgccggatggcagaaagaaggcgatacttacgcttattacgaagacgatgggaccagagtggaaaatgctttccgcaaatcaggaaaccagtggttctatctggatgaaaatggccatcttttaaagaactgtgaacgtgagatcgatggaaagatctacgttttcaatgaaagaggtgcagtggttccttccgctaccagaaaagcaggaagcagtgaaagttctgagtctgatttttctgccatcagcagcagacagcagtatctgaacaaaacagcaaatccttatatgaacaataagaccgttcagtggatcaatgctacctatgccattcttacaaagcacaatggcggaaatatccgtgcttttggcggaagccttaaagtaaatggcaaagaagaaaatggtgctgagatcgacaagactaccagagatcagacccgcaagatgttaaaacagagctggggtgttactgacagggattctgcagatgaggccttaaatgaactcttggagtcagcaaaggaaagcggttctgcctgggattacagcagggcagagtctaatctgggattttattatctggcagattattacacagaaaaagaggctttagataaggcactggaagttgcaaaggagatccagagtacctttgaatcctgggactcttttgtacagagctatctggaaggttatgaagcaggctccggtgatacttccggtgacagggaagaaatctacgaaaacctgaaggcatgccagtggaatccatattctgtgaactggaatacaaaattaaaaaagaattggtaggtatagcttatgaaatggggaattttggcaacaggaaccattgcagagaaatttgcagatacagtaaaccatatggagcaggaagatgagactttgatcgcctgtgcttcccgcaatttagagcatggaaaagcatttgcttccaaatacgggatcccgaaggtttacggaagttatgcacagatgatgacagacagcgaagtagatgcggtttatattgcaacgccaaacagtctccattatgaaaattgccgtatgtgcctggaagcaggaaaacatgtactttgcgaaaagccatttaccctttgtgtggatcaggcagaagaactgtacgaactggcagaggaaaaaggcctgtttattatggaagctttctggatccggtttttgccggcatatgataagctgcgggccatgttaagagatggcgtgatcggagaggtaaagcggatcacttcccagtttggatttacagtggaaggcgacagaagagaacgcaagtttaagtctgaattaggcggcggagcgttattagacattggtatctacaatcttggattttttcatatgatcacagaagctgcgccggaaggatttcagtcagaagtacatatgacagaatatggtaccgatgattacagcgaagtagaactggaatatccgggaggctgcagcgctcattgcatccaggcaatcggaaagaaattagaacgccacgcaaagatcgaaggaacaaaaggcgatatcctgatggatgatttccagcatctgcaggaatttaccgttcagttaaaagatggatcctcttatcttgtaaaagagccgtttaaggtaaacggttttgaatatgagatcgtagagacaagccgctgtgtcagctgtggtttaaacaccagtgaccgttatacaaaagaagattgcttgacgatcctgcggttaatggatgatatcagggagtcatgggatatgacctttgaaggtgaagaaaaataaaatagagaaggttagtttttagttttaaggcgggatttcagagatgggatcccgtcttttttgtattttccagaattattttctggaaaaacaaagggagtcatgtggtgtacaatataaggcaaagaagagatcagtaaaggggatgaaaaaaatgacaatttttgagtatttatatggggacgtatattatacagatgaatatggaaacgcttattttgattcctgtgtggatattgattatgaattagatgaaataccggaaattgtaaatttaggggatcatacctatttcatggcgaaggaggatttagatctctataaccagtatgatattagggtggatggggttagtgaggatgatctgaggttcttacattataccagaagaccctattaccagatgcggggacgttccgtttccagagagcaggcatttgatatcatccgacggacggacaatttctttaactgggacatggaaacaataggaaatcgcaaagagtttgtacgttgcattaattttgataactggcttattatgaaaaatcattatcccaaaggatacggctggatccacgcggatggcacagttggggccaatgcgatcactcagaagtggccgacgctgaaggagtttgtagaagaatggttttataagttaaaagcattcccttatctggacctggtaatcgggatcacaaattgggatgagatctcctgggatgaagatgacacctttgaaaaagcgatccagatggggatttatgtacatgataagtgcattgagttcttaaataagcagaatgcctgggcgaagtaccaggaatacgatgagaaatacggtgcagatccggaacgatttgaaacggattactatcagaaaaatgggatcgttcaggtagatgaagcctatttgagaaagtgcattgagtcttatggtttggatccagatgaggaattgagtaaggttcggccttatatatggaagggagaaataatggaagaaaacaaaatgatctacaaaaatgaagatggcaattatcacatcaggatcttaatgttacaggagcagtgcaaacaattaaagttagcatatcccctggaagtggatgtatgtgtgtgtgaagcagaacgaagtaaagagtgggaggaaagtatccgggaaaaaatcgaagatgcgttatatgagatggtcgctcctgtggatgaggatgatttctattcggatgtatacagagcatggtttgaggaaattgcatggaactgggagctggaaaaagaagggttcctgccggaagaaaaggatcctttctctgaaatgaatatggacaggactttactggcctatcgccgtttgtgtgcctgcctgactatagtggggaaacaaaaggaaatagagcgtgtttttaatgacggggcatatgcggaagaactttttgaacgatttggtattcaggactcgccttatcggctttgaatatcatttggacagtaagagggagggagctaatgcaggaaaaaagaatgttggaaatatgatataattaaaaatattatatatctacaatattaaaggagaggggattgaataaaatgggagaagagaatggtaatgagcgttatctggtaaatgttagtaaacttgagaaacttatggaagaaaaaagaaacgagcaaaatgtaaaaaggatacgtgcgttatttaaaaattcagatataggaatagacgtgagagctgaagatgctttggatacggcatattcaacgtatactacaataatttcaaaaaaaagtgcaacgaaaaaaactttacaactgttagcggactatttaaagcttagtagttttaaagaattagttgctgaagataattctatgatagaacgagaagaagagagagaagacgtcatatcaaacgtaactgagcatatggagggattagatccgaagatagttaatatgttgtcggagttttcagaacagttgtatcctatagataaattaaagagttttacagatgagcattccattgcttatatgagagttggatatgaaaaatatatggttaatataccgctttcagcagaatggagaagtctttttgtaaaaccaggagccagaatttatgttatcaatacagattcaaaaaagaatttggaagatgaaataaaaaaaggtttaatttcaagattaaagagacattgtacaaataagggagaatcgaaagacagggaagtacaggagttagttgaaaaacggaagttagtccagataaaatctgatttctataaaaaaataattgcagaatcagctatgcagatgaatatggataaactaaataatgcaataaaatttgatgctgatgatgaaattgaatatattcctttaggggataatgaatatcgagtcattcttccattgaaaaaagattactgcatacaattaggtcttggttcgtcagtgcagcttgatatttcttttgaagaagatccggttgaagctgaagatgattttagagagatgatagaaaatcaattttattcggagtatatagaaggggagcaagatttagatccagatgtggaagaagagctagaagaaattatagaagagatgtgggagatgccaattagaaaaattacatttatagattggctagattcagaagaaaatttaaagtggcttaatcaatgttatgtagcactttggcaagtgctgtttttgcggggggaatacgatgaaatacagcgtacaattgctgatctttattatgcgtgtgagaaatttgaagaacttggaatcccggttccatttaaaaaatttatataataatttcataaatggatgaaagaataggggttattaaattgaatttgtaatatataagggctggatagcatttgaggctattcagccctttaacgattattttcagtgacgattatttccagaattttttcctggaaacacaacttgcttttaataacttataatagaaaacgtaaagaacaaaacacattaacatatatcacatacaatgaaataaaaatacaggaggaaaagaaatgagagaattattaatgatccatgctcttgatgaaagagatttactcaggtccaggattatgggaaagataggtaagatcacttttcttgattacaagaagcagtgtgaggagagaactgcagaaacacttatggaggagaaggcgttctgcgataaagtaaaggatgagttccagagtatcaaagatctgatcaggaactatgatgagcttgatgctgcgatcatagccagcaatgctacaaccatcgtaaagacgaaatatggtaactatacggtagcagcagctattgcattgaagcagagattgaagttatccaatggcagagatattaacaaggcagcccttcttctggacaaaaatcttgacctgaagaaagactttgagtctgaaatgattggtgtaatgcagaagcagatgatcgacattatggcaaagcttaagaatgcccagactgccctggaagcttctgccgaaggaatgcgcaacagcattttaggcggagataaggcaaagaaagactccgcttccatagctgtagtggatgaatatctcaagaaaaacagttataagcttgtggatcctttaagcctggctgataaattacagtctttgaaagaggagcgggaggatctgtataaggaactggatacagcagtcaagatctccaatgcaacgactatgatccaggtaaacttctaatttcaacaaatatatgcctgcatggcgaaaactgaaacctcagccacccgctacggggtaaacgtagcaaaaaaggattggaaatccttgattatgagttcgacggttgaacatacggcgtatggaccgtagggagcaggttcgattcctgtataatcataagagtctgatttcttttttatgatagatgttttgtcaaataagatttctggttgtgttatctggttttactttacaatgttttttgtaaatattggtaaaaaccccggaaataaggttttgagtgcggttgagttgactccaggtatcctccgggctgccatgcaggcattattaaaaattaatagaagaaaaataggatatgcctgcatatcgaaaatctgaaactttagtcccccttagctgcaggggtaaatgcagccatatgaaggcagtgtttgggacactgatatcttctccatagagctcgatggttgagcacatgactcttaatcatgttgagcaggttcgattcctgttatggaaaaaatatagtttgtttcttttttatgatcattcatttgttgtggatcttttctggttttatcgtttgcttattctttatatatttttgtgtgacacatggtaaaaaaccaggggaacggtttttagcaagactaaactggcttcaggtgatccgcctggctgatatgcaggcattatttttcggaggaaaagatgagggtaggagaaataagtacagaacgattgatattacgccatagtgatcaggacagagatgattggaagcttttgatgatgctggaagaagagggagacttccggatctttacaggagtggagtattctgagaagtaccgggatgattttctggattattttgaggttacgcatggaaaccgctgttattattctttgtttccaaaggaggatccggaaaaatttattggatatgcgggatttcatacaagtttcgtccggcgatcagggttttggaaaaacttggttttataaagtcagatgaaggtccggcaacgataatgagtgagtttgtggattttgaggacgaggagtcctgtttagaacttatatctgagtataaattagaaaataagaattgcgttacagactagatgatttgatgcgcgggtttatatatacaatagaaaaacagcgtttttggatgatgggaggtgccagatccattgatataacggacggactttttgataaagaggatccgttattaaaggaaaagatccttgatctgaaaaggcagggaaaaaattattatcggatccggggtattaactggtttcctgaggagatgccttcagaagaggagctggaaagagggatggagtgtctgcggaaaaatgggatggagacagattatatcattacccatggggcgcctgccatggtgtcaaattatttttcagcttggagatttaagaccgatgaactaactgattattttgaaaagatcagaaagaaagctcagtttaagcggtggttttgcggtcattaccatatggatgaaaatttggttgttgaaggtaaaaactttcagatcctgtataacaaaatagagagaatttattagccaggtttcttaggttccagaaaaaatttctggaaaatgcttaaggtctttttgtgctatagttatgtcagatgaaaaaaggagcttatatttatgaataagattattaaatgcaatcttggagttcaatatgtagcagaagatgctgatgccaaaaatatttatgttactattatttattatgacgattgcttaaaaagaagagaaagagtgcgacttacctatacgaatataatgcagctgctttcaagctggggagcatgtcaagtggagggaggatgctttatggcggaagatttttataatccgggcggcagaaaagatttgggttgggtcgtatcactggtgctgaatgaagcttaccattttaatatgattacaaaagaagagtatttggaaaaggttcgcagtcattttgaggaatattacatggaagattatagatcaagaagaaaacgctgctctgatttttataatcgttattttccggaaaggacaaagcggatctataaaaattatgaagaggtgatcgaacattattcacaggaaattgaagagaaagcaaagcgtagaagtcgagttgtaggtggagaattttatgggtgctatatggacagtcaggaccgctgcaggccacttacaagaccaaagcgttatattagctatattttagaagaagaaaaattatgggtttgctttacagaggaattactgaaggcagtgggatgaccgggaaatatacagcgtccttgccacaaaaaaatgcccgccgatcggcgggcattataaacgacaatcactttttagcagcctttttatcagtagcagctgcgtcatcttcctcttctgcatcgtcatcatctgtcttgacgaaatccgcaatatggaacagctgggtatcagctggggtggaaacattgacgcctttttcttccagtttcaggtcttttacatacatattctttgtacctgcaggcagttttgccaagtcgatctcaattgggtccagaagatgagcagggtctgctttgtagtgaatctcggaaagttccggttcaaagacaccctgaacgatttcttcattgagaaaatgaacaggaacggtagcggatacgacttcaccggcaaccagtgcctggaaatccagagccagtacttttttgctcattgggtcataatcgatatttttaaccatggcgtttacagtttctccctcaatatccagggcagtctgtgcgccttcttttgcgtccttcataaaacgcaatgcttctttttcttcaaatttcaacgcaacgttttctttcatttccttaccatataaaacaccagtaacgaaaccttcacgtcttaattttttagcctttacctgtggatctcttttttctgcttttaacgtcgtcataatgattgcctcctacattgtcactttaaattgacaccaccgatgtccggtaaaagtaccgggacatctggcgtgttcgtgtagattgagagcttttatgaagaagttcttatttgcactaactgtattatagcacttttgaaaaaaatggaacgtttaaaaagtgacaaaaatcaaggctaaaaacaaataaaattgtgaatattttgtttgatacattaattatgaccaactatttcctggcttttaaagatcttaagaaacagaaaactgaagcagtaagccagaaagctgcagcctataaggagcataaaagtacgtgccggataccagatcttaaagagaaatccggctgccgcaaagattacggcaaacagtccggtagcaggcagatgggaggtgccgataaacagggcattgaataaaagctgcctggaggaacattcataccgggccagaagaggaaacaggtagatcaggcagatcacaagggcgatcagcgctgccagggaaaggacactggggatcagtgccagcaggctttcaaaggaaagccagaaaaacaggcagaaaagaagcagggcaccgatgcagatgcagccggcaaacagaagactggaccggataaaacaccgggtaaaggtatgaaaataagtttttgtaaagggaagtcctttgtcctctgcctctgccatggtcactgtataaagggcggtaagtgccgccccaatggtgaaaaccggcaggcaggtcaaaataaagcagatgtttaatataacaaaatcaaaggctgtattgataaactggaaaaacggggcgtttaaatttaatttcattggggtaattcctcctgtattaataaaacaatcgttcataatggaaataagtatgtattaagtatagaaaagaacaggcattaaaagtagaagaaaaaacacaggaaaagtacagcaaaaataagatacatccatacgctaaaaagaaaagaatggaaaaattactatattatttctgaaaaaggaagggtactggcatcaaaatcaccatgctatactttagaaaaacaatatagggggaattaccatgaaagaaaaaccgaaaaagaagaagctggatcagggaaaacgcatgtttttgtacatgctcccgtttttactgttatgttttgcattttcttatttcccgcttcatggctggatctattcattttatgactacaagccgccgttgaaattatcccagtgcaattttatggggctgcgctggtttaaaatgatctttggaaacccggctcaggtgcgtcagctgtttattgtaatgcggaatacctttgccatgagctttttaaacattgcaacatcggttctgccgctgttctttgcagtgtttttaaatgagatcaagtgcaaatggttccggaaaatggtgcagaccctgactacgatcccgaactttatcagctgggttttagtatatgcagttgccttctgtctgttttccaatacaggcatggtcaatacagttttccaaaatctgggagtgatcttaaaaccgatcaaattcctggacagtgattcccacacctatatcgccatgctactgtggagtacctggaaaggtcttggctggggcgctatcatgtatctggcttccattgcgggaattgatcaggagatgtatgaggcagcccgtgtagacggtgcgggaagatttcaactgatgcgctatatcacacttccggagctgatgcctacctactttgttatgctgatgctttctgttgcaaacttcttaaataatggtatggaccagtattttgtgttccagaatgcatttaacaaagcacatatccaggtactggatctgtatgtttacaatattggtatgacgggaagcagcctttctctggcaacagcgatcagtatgttaaagagtctgatcagtgtgactcttctgatggcagtgaatggaatttcaaagaaaattcgcggtgtttccctggtataacagtaaacagtgggaaaatgtaaaaaattggaaaaggagaaagggaatggaaagaagaaaactgacaggaaaggataaggtgtttaatgtttttaattacggggtatttggtctgctgacactgatctgtgcctatccgttctattatctgatcatcaacactttaagcgccaatgacttaagcgctgcgggagagatcctgtttttcccaaagggctttcatttggataattataagcaggtattaaaattaaacggtatttttaacgcggctgtgatctcggttgccagaactgtccttggaacagccctttctgtgcttgcatccgcgtttatgggatttatgtttacccaggagcggatgtggggaagaaagttctggtatcgctttgtagtgatcaccatgtattttaatgcaggtatgatccccatgtttatcaccatgaaaaacctgcatctgaccaatacattctgggtctatgtgatccctaccattgtacagccatttaatattatcctggtaaagacctatgtggagtcattgccaaaatctttacaggaggcagcagagctggacggggccggtgtccttatgatattctggaaagtgatccttcctgtatgtacaccgatcctggcaaccattgctattttcacggcagtgggacagtggaattctttccaggatacattgatctacataacagaccagaaattatattcccttcagtaccttctttaccagtatatcaaccaggccagttctctggcgatgacagtaaagaacagtggcggcggtgccatgaacatggcgtccctggcaacacagcagacctctacttccattcgtatgacagtttctgttgtggtagttctgcctatcttgtttatttatcctatgttccagaaacattttgtaaagggaattatgatgggagctgtaaaaggatgatgtttttgatcccggaaagttttacaaggggacatcattaattaaaggaggaacaaaaacttgaaaaagacaggaaaaaaatggatggctctgctgatggcattttccatggcagctcttacagcctgcggaagcagtgaaaagacagcgagatcggttcttccacgagatgccttcctgcgggaatctactatttaagccagaatgaaaattctttaggacagcttcagacagacggggaattaaagctgacaggcggaactgaccggctggcctattacatggataaagacggacgggcttatacaaatacactggtcgatgggaaagtatatggcccggacggaacccggattcagtcagataatggctgggatattgtaaccgtagaagaggatgtttacaaagacagtgactacagcggtgccgatcttaaggaaaatgcaaaacctgttataatggcaggaagcagcgtgatcgtaaataacagcggaaagctgaaaaaaaatggaaaagtaaagctggacggtgttacataccaggtaaaaaattatgcagtccaggtaacagaataaacagaggtttaagaaggatcatctcagagtaccacaggtaccggaagagatggtcctttttgtgtacatttatggataattattggaatttattgaaaaacattcatcagtaaggggaaaagcagttattacagttgtatgcggaaaatataaaaaggaatttcaggttacggtatgggaaaaatttttaccagactgggttgcaggagaatatgtcaatgctccgtacacaaattcggggaaaacaggcttgtcagtagatataagcacttccggaaagcgagcattgtcatacccatatacagaccagaaagggattaagctggtagcaggagaaacgctgacagtatcctgtgatgacacatatgaagtccagaattattatgtaatcattccaggaaatacagaccttcagtatacaactgtcatgcacaatggaaatccgtggatggtagtagatccggatgcaggtggatccacctcaacagaaactccgtttgataaggcaaatgtttcatacactgcagaagaggagtgttacattgcattgatgatccggcgaaaagctaataacaatgactttgacagcgaggaattaagtgctttgagcagtcatgttgtatgtaagataaatccgtagtaaacgatgaaagaaggtgtaaataaagatgaataggagcacatgtatgagtattcaggtttgtgtaaccggcttggttgcatatttaagtcagaaattaggagtaaccttttatcttctgggcattttgctctgccttatggtgatcgattacctttcaggtatggcagcaagcgcagtggaggctttagatcatccagatgataagtcttatggctggagcagcaaaaagggtgctaagggcattgctaaaaaggtagcgtatctttttgtgatcgctgtaggaatggtaattgattatgtgatcatacagacgtctggtgtattgggatttaatctcccaaatacaatgctttccttgctggttacagtatggtatatgttgaatgaagcattatctattacggaaaatgccggtcgtatgggtgcaccggtgccggagtggcttatgaagtacatagcagcactgaaaaataagattgatagcagtagagaaaatgtaagcagtgagacttaggatggaggtgatccatacatctcccgtaggcagctcgggttatggctgccatttgcgacgtcgcaattatcagtagaataaaaatcatgcatatgttataatgtcaaagttaccgcccctatacccggtaaggaaagggggtgtctccaatatggaaccagtgctttcttttattgtcgctgttgcggctggtgtagcctgccactacatcatcaaatggttagacggtgacaaataatcggtaactagcctatggtttaagccaccatacaaaaaacggaatagaaaagcccagggaattgcgctccctgggcttttcgttttgcgtctccaatactggtgctttctttttgcctaacggcattatagcatatgcagaaaatcttttcaagataccatttggaagaaaggaaatgctatgaaaatatcagataacggtttaaatctcataaaaaagtttgaaggctgccgactaacggcttatcaagatgcagtaggtgtctggaccatcggatacggcaccaccaatgctgacaaagcaatcacgggaatttctatccgtcaaggtttgcggatcagccaggaaacggcagatgaatggctgcggcagtctgtagataaaaagtatggtccaaaagtagacaagtatagtgcctacaactggaatcagaatgaatttgatgcacttgtaagttttgcttacaacatcggatctattgatggactgactgcatctggatcccgctcaaaagaggagatcgcggataaaatccaggcatacaacaaggccggaggaaaagttctgtccggtcttatcagaagacgtcaataagaaatccagtaaatacaaggttctttaataatacaaatcttaaagaattttaagaaaaccccattgtacatttaagaaagattttctatgataaagtcagaaagaaacgaagagctgttttcacggatcaggatacagaaaaaattccgggagagcaggaaaagaaaaaggaggttacatagatatggagatcaagaaaccagccatggcaggaacactggaatccagtgattgccaggtaaccgtagaaccgggaaatggttctgttgagtttaatctggaaagcgctgtgatcaatcagtacggcaaccagatccgcaaggtagtccttcagacactggagaacctggacgtaaaggatgtaaaaatttcagtggtggacaagggcgcgctggactgtaccattaaggcaagagtagaaggtgcggtattccgttctttagatcagatcaaggatatcccatggggaggtgcagtaagatgatcaatgcgaataagaaacgtttaagaagaaccatgatgttcttaaatgcacagaagccaggtctgatcaaagacccatatatctacaaaccagactccattatgctggatctggaggatgcagttgctgagaaccagaaagatgcagcacgtttctctctgtatcacgcattaaaagagatcaactacagaggttgtgagagagttgtccgtatcaatggccttgacaccccatactgggaagaagatatccgctgtgcagtagcaggcggctgtgatgccatccgtatccctaagacagaaagcgcactggatgtacagagagtagaagctgtagtagaagagtgcgaaaagaagtacggtatcccggaaggccacacactgatcatggcagcaatcgagtctgcaagaggtgttatgaaagccctggatatctgcgaagcatctgagagactgtttggtatcgctctttccggtggtgactatacaaaggacttacagacacacattaccggtaccggtcttgaactgatgggtgcacgccagaatatgatcatcgcagcccgtgcagctggtgtacagtgttttgatactgtatacacaaacctggatgatatggaaggtttccgtcacgacgtagagaccatccatttaatgggatttgatggaaaatccattatcaacccacgtcagatcaacattgtacatgagatcttcacaccaacccagaaagacatcatctttgctgaaaaggtagtaaaagagattgatgaaaagaaggcactgggtatcggcgtatttactgtagacggcaagatgatcgacattgcattctatgacggcgcaaagagaaccatcgaacttgccaaggcatcaggcgtatataagggggatctgtaaaatgataaatgcagttggaagagatataccagaagagatcctggagatgaccggtaaagaggtattccagggaaatcattacagggacggatatgtatacaaaaaggacggccc

SEQ ID NO: 3632 - DNA, 65538 bp, Unknown
  gut microbiota DNA sequence
aaacatccatgatgtgctgataaaatgcggcatcaaggacggcatgaccttaggcttccatcatcacttccgtgaaggtgactatattgtaaatatggtcatggaagaagttcataagatgggcatcaaggatatcacaatctgcgcaagttctttaggaaaagctcatgacccgatcgttccttatatcgaagacggaaccattaccaatatccagtcctccggtgtccgcggtaagatcggtgaagcaatctccgcaggtaaattaaagggacttgcaatcatgcgttcccacggtggccgtgtaagagcgatcgagagtggtgagaccagaattgacatcgcatttatcggaaccccaacctgtgacgattacggcaactgccgtggtatcggcggcaagagtgactgtggcgtgctttcctacgctatggtggatggtgattatgcagataaggtagtagctattaccgactgcctggtaccattcccgaacttcccggcacatatttccatgactaaggttgattatgttgtagttgttgacgctatcggtgatccaaagaagatcgctaccggtgcagcaaagccaactaccgatatgagaaagctgatgatggctgattactgtacccagtttgtagtaaacagcccatatttcaaggacggcttctcctaccagaccggtgtaggcggcgcatctatcgcatccactatctctctggctaagatcatgaaggaaagaaatatccgcatgcgttttggcgtaggtggtctgaccaagccaatgtgcgacctgctgatcaacaaccaggtagactgcctgcttgatactcaggactttgacctggcagcagtagagtctgtaaagaacttaaaacatttccgtatctctgcaggtgagtacgcagacccatttaacaagggtgctgttgtaaataagctggatttcgtaatcttggctgcactggaagtagacgtaaactttaactgtaacgtagttgtaggttctgacggtgtcattaccggtgcacagggcggacatcctgatacagcagcaggagctaagtgtactatcgttatcgctccactgcttcagggaagaattcctgcgatctgcagcgaggtaaccacagtaaccactcctggagagagcattgacgtagttatcacggattacggtattgctatcaacccaagaagacaggatctgatcgaggcaatgaagggcgtagacctgccatttaagaccattgaagaactgcgtgacattgcatattctatcgtaggcgagccggagaaggttcagtttggagacagagttgtaggtatcatcgaagcccgcgatggcacgatcatggacgttgtacgccagatcaagccatatgagtttgctgactaagcaaaccaaaaacaagcggctgcgcagcagacatttgtttttggtgcgtgtcagcaacgaacaaaccgcctgcgtaagcaggcagtggagcgcgtaagcgcgggtttgtgagtctgcaaaatttataaatctacaaaacaaggcccatgcaggctgccggtacggtagcggcatgggccttttccatttgaaaatttcaaaccatgagaatttatctcatctcattcaaaatatccagatccgacacaggtttgatcatatagttatcaatgatattcttctctttcgcctctgccagttcccggtctacctggttggccatgatcaggcggagcattccattatatcttcccttaacagacatacagaaatctacagcggaattcccatcaatgaactgttctacagcaagagcatcaaagcggtctgtttttaatttttttgtcgcttctttaaagttcatcacgcaggtgacttttatatcccgttttgagaagttgcgttctaagagacggagtaccttaggattatcatccacgatcagcaatgagattttttctcctaattgatctgagagattttttctcacactatccagcgtatcctggacagacggggcaaagctgctgtttccatctggtacagatgcaggaaagtacagatggaatacagaaccgacgccaggtgcgctttccgcatttaccacgcctctgtgagaagtgacgatctgttctgtaagggccagcccaagtcctgttccttttccaccttttttagtagtaaagaaaggatcaaagatctgctttaatacatccggactcataccgcagccattgtcccgtatatcaatgcgcacatactgatcccaggcattttcatttccaataggaagatccggatccagatcctttttatctaacagaatggcagatacctcaatctcaccggtttcatgtccaatggcatggatggcattgacgccaatatttaagatcacctgatttaactgggtctcgtttcctacgatggtaacacctggaaggttaatattttctttcagttcaatattatccggacatacggagcggaccattttcaaagcacgtttaaatacccggtcagcgtctaaagtcttaaaggcagtttccatatttttgcggctgagagaagagatctgctgtatgatctccttggcttttacagaagcatcataaatttctttggcactgtcatagttgtcggagccttccggaagatccatcatgagaaattccgcatagcccatgatgggtgtcagcaggttattaaattcatgggcaataccgccggtcatggttcccatgatctgtaaacgctgctggtgggcaatggtttcctcactttggtgcattcgctctaagattccatttaattctgttaaataagagatctgctgacggtcctttctgctctttaacatcagatggaaaatataggaagcagcagcaagaatggtaaaaagaacacctgtaaatacaaaaagcagttttaaggcgcctttttccaaaggtacatacatatcactctggtccataacagcgctgacaatgataaaatcatccccaatataggccggggtataggcgctgactttctccactcccggggcacctggtttggtccaccagtaggaataatattcatccacagccgtcagtccctgtttttgccggtcgatcatattgctgagactggtgagattttttccgggaaacattttttcacgtccgtttattacatcaattccccattgctccagctgtggatgcatcagtacgatgccattgtggtcttttaatatgaaataaccgttggttcctacatttaaggggcgtatggtcttattgtaataggccatgccatttaagatcatggaaatggtttctccggtgtcggtttcgtagtggagcataagatagtgactttcatttccaatctttaccagtctgaaacacatctgatcatcgatttttgactcagaaagtatctcttccggctcattgtctgtaccggatgtcaggatggtttctccttttttcttgatgataacatcctggactacaggaccatgctcttttacataagtatcccagagcgtttctcgttcctgttcgtttaaagtatggctgcagctccacatgcttcttatgtcagatgcatattcgctgatggtttcttccagacgtccggaaaggctttccactgctaaaagcatctgatctttctgattgcgtacagcggagttgcggtattctttccagatcccgttgccgacgcataaaagtgccaggatagcagcagctaaaaatgccgcaaccagatagaagcggctgtttttctttaatgagtccatagacaggaaacgattttctttgcagttttcattcttttccatataagcgatcatgtcctttcaggttgacttgcttctttggtaatattataatgaatttaatgcatatatgcaaaagttttatgataattccacgaaatcacacaagaataggaaaagaaacatggcagataaagtactgatcgttgatgacgacatttctatttgtaaattacttgaaaaagtaatgcacagcaatgaacttgatacagaagtggcaggaagcggaaaagaagccctggagctgttaaaacaccatacatatgatgtgatccttatggatatcatgctgggagatatggaaggttttgatgtgatcaaagaacttcgtgcaagcgggatccagacaccggtgatgatcgtcagcgggcgaaatgaggattatgactctttatatggtctttctattggagctgatgactatattacaaagcctttcagaccgttggtccttggggcaaaggtaaaggctttgatccgccgtaccaaaaatatgggaaatcattccgataccattcagtgcggtcctttcacctacgaaagttctaccatgcgtttttataaagaaggggaagaattgatcttatcttctaaagaaagcgcgctgcttttattatttattaagcatccgggccaagtatatacaaaagatatgatctacgagcaggtatggggaaccaccatcgccattgatgacaatgccattatggtctatatcaaccgtctgcgcagcaagatcgaaaaagacaggcagaaaccagagcatattattacggtacgcgggatgggatatcggttcctcccgtaaatgtacgaagattaatacaaaccttaacaaattgtaagataaatctcttatacctgtaaggttgcctcgatatactcatttacagatagaaacatgacataaaaatgtaaaggagagaaagagtatgtcagaggttgtagtaggtcttcttggttttgcctgtatcgttgctatcgttgtaacactttttaagagcaaaacccttcccagcatcgcatttatcatcttcccgatgatcctgggagcaattcttgtatttggcggttactattcatgggaaaacattggtaagctgatcaaaagcggtttttccagcacaggtccaacagcggcactgttcgtattcagcgttctgtacttcggtatcatgaccgatgcaggaatgtttgatgtaattatcggaaagttaatgctgttagttaaggacaatgtcattggcgtctgtgtcatgacctgtatcattgccctgatcgggcatctggatggcggcggcgcttccactttctgtatcgtagttccggctatgcttcctgtttacaagaagatgcatatgcgtccggcaacattacttcgtattgcagttatttccatgggtgttttaaacctgatgccatgggctggccctactatgagagcagcaaccgttcttggtattgaggcaggttccttatggcagactcttttaccgatccaggcatgtggtatcgtactggcactggttgttgcagtattaaacggtatcattgagcagaagagaggcgctggtttaaatggtaagctggcgaaagaagcagctcatctgagcgtagaagaagtagctgcagctgatgcggaaaataaagatctggctcgtccaaaactgtttgtattcaacgttattttaaccattgcagttatcgcactgttaattaaagacatattcccaagctatgttcctttcatgctgggtgttgcaattgcaattctggtaaactacccaggcgcaaagatgcagaaaaagatcatcaaccttcatgcaggtccggctctgatgatgtgctctaccttaatgggtgcagctgtattaatgggtatcctggttaaggacattgaaggtgtaaacagtgttatcacttgtatgtcaaacctgatcagcagcattttaccggcagcacttggacagcatctgccattagtaattggtatcttaagtgtaccgttagcactggctttcgatacagacagctacttctacggaatgcttcctgttatgatcggaattggcgaaggatttggcgttggagcaatgccgatcgcagttgccatggttgtatgccgtaactgtgcaacctttatcagcccaatggtacctgcaactttattaggtgtaggtctggcagatgtagatatcaaagaccatattaaattcagcttcctgtgggtatggggcttcagtatcatctgtatgcttattggagcaattgtaggaattattccattataatcctataacagatcattacataaaatcagatagataaatttaaaattcaaatcctcccccataaaggagctgctgcaggcgtatcgttgcggcagctcctttgtttataatgcatatcaggaacgcactggtggtctgtttgcatattttaaatgtattgactttccgttcaaatctgcctaatattaaaaccaggtcagatttcacgaagaaatcgtgaaacagcaaggagataaaggattatgacaaaagatctgacaactggaaagatcatgcctattctggtgaaatttaccattccactggttttgggaaatctgttccagctgacgtacaatgcagtagacagcattattgtaggacattttgtaggaaaagaggcactggcagcggttggtatctgcaacccgatcacaacacttatgatcttattcttaaatggtctgtgcatgggagctgctattttaatgggaatgcagtatggagcaaaagattatgataccctgcaccgccagatcagcaccaccatgctttcaggagtggtcttttctgttacattgaccgtgctctgtgttatttttgcagtgcctatgttaaaactgatccaggtagatccgtctattatggatctgacagcagaatacctgcggatcatattctggggactgatgtttacatttttatataacttcttttccagtaccttaagggcattgggagacagtaattccccgctgtatttcctgatcatcagtgccgtgttaaatgtatttggcgatctgtttttcgttatcgttttaaaggacggaagcaggggctgtgctatttccacggtattaagtgaagctttatgcagcctgttttgtgtgatctatatccagaaaaaagtgcctcttctgcgtcttggaaaaaaatggctggtatttgacagccgtcttttaaagaagaccattgcctttggctgggcatctgccatgcagcaggcaactgtgcagttgggaaaaatcggtatccaggcgatcgtaaataccatgggtgtatctgtttcagccgcatttgcggttgtcaaccgtattgacgattttgcttatacaccggagcagaacattgctcatgccatgactgcccttatggcccagaataagggggcaggaaaaatcgaccgtatgaaagaggggttccgctgcggcatcatactggagaccatttacggtatcctgatctttatcatctgttttgcgcttgcaagacctcttatgatgatgtttgtaaaagatgaagaggttattggacatggtgtaacttatctgcacctgatttctgtaatgtacctgcttccggctcttaccaatggtatccagggatttttccgtggcatcggagatctgaagatcacattaataagcagctttatcaacatggcgctgcgtgttctggcagctgcgcctttagtatttatatggaaaatgggaatcgaagcactgccatattcctatctggctggctggatcggaatgctggttgcagaaacaccattacttttaaagacttataagacctggggaaagaaagctgggcagtagagctgggcagtcctgcaggaatgcagattatatgaagggagagaaaattcgtgttagaaggaagaccattaaagggatatgacctggagcgtttgaaagaatttttaaagtccatggacctggattatgatatggggatcgagtacagtatctgtctggaagatgaggattaccgcatcattgcagctggttctgtagaggaaaatgtattaaaatgtatcgccatttccccggatcatcagggagaaggactttccggcacgattatttcccacctgacccagtatgagtttgaaaagggcagaagtcatttattaatgtatacaaaaccgaaaaatcaggctatgtttgaggacctgggtttttatactattttaaagacagacagagtcttatttatggaaaataaaaagaccgggtttacggattttatggaaaaagtaaaggcagaaagtccggaagatgccttaaaagaaggaaaagtcattggtgccattgtggcaaactgtaatccatttacattgggacaccgttatctgattgaaacagcattaaagcagtgcgattatcttcatttgttcgtgctttcagataagcgtaccttttacagtgctgcccagcgctatgaaatggtaaaagaaggagtgaaagatttggaccgtgtgatcctccatcatacgtctgattatattatttccgcagctaccttcccgacttattttatgaaggaaaagacagaagcaggaaaggcaaactgccgtctggatctggaattatttggaaaaaggatcgcaccagaactgcatattacaaagcgttttgtaggaactgagccaaactgtgctgtcactgactgttacaatgtgaccatgaaagaagtccttccaggactaggcattgaagttacagagatcccgagaaaagagcaggagggagaagcaatcagcgcttcccgtgtgcgccaggcagtaaaagaaggcaaaatagaagagatccgcggcctggtaccggaaagtacctggaagcatatagcaggagagagatcatgacaaaagaagaacggacccttgttatcatagaccgtctgaaaaaagaatatcccgatgcaggctgcaccttagactacaatcaggcctggaaactgcttgtcagcgtccgtttagcagcccagtgtacagacgccagagtcaatatcgtagtggaagacctgtataaaaagtttccagatgtaaattccctggcagatgcaccggtggaagagattgaagctattgtaaagccatgtggcctgggacacagcaaggcaagggatatcaaagcctgtatgacccggttaaaagaagattataacgggaatgttcctgatgattttaacgctcttttaaagctgccgggagtaggcagaaaaagcgccaatctgatcatgggagatgtgtttggaaaacctgccattgtaacagatacccattgtatccgtctggtaaaccgtatgggattggtagatggcatcaaagagccgaaaaaggtggaaatggccctttggaagttagttccgccggaagaaggaagcgacttctgccatcgcctggtgtaccatggaagagccgtgtgcagcgcaaggacgaagccggactgtgaacattgctgcgtaaaggacgtgtgtgttactgcgtgtggggtaggcacttttggaaccgaaagtgccgtacgataaagtaatggttgtgagaatttgccgtatttaaatgcggagccacggcaaattctgttgctggtcatgcaacgcatgaacagtaacacgtgtgtgaaaaagtgggcgtagaaggctgaaaaatgccctgttaagaagcaataaaaaatacgctaaaaagctgttaatacaatttaataaaaagacaaaatagtcttgtagaaggcaaaaattgtccagagaaatccctctctttttttattatacttagtgcataagttccaagaagatcgacgccgggaaagctgctgttggcagatatgacaggtaaatgatctgagatgagaacaaaatccagtataaagaagagagggatatttttatgaaagggatcatgaaaaaagcggttttccttgcagctgccggtatgacggcgctggcgctttccggatgttcagcgggcagtagcggaaagcggatcgtgcgtatttcccatgcgcagtctgaaacacatccggagcacctggggcttttagcatttaaggaatatgtggaagaacgactgggagataaatacgaggtacagatctttccaaatgaattgttaggatcagcacagaaagccattgagctgacacagacaggggcgattgatttcgttgtggcaggtactgccaatctggaaacttttgccagtgtatacgagatcttcagtatgccgtatctgtttgactccgaagaggtttacaagtccgtaatggaagactccgattacatggaaaatgtatacgagtcaacagacgaggcaggtttccgtgtggttacctggtacaatgcaggaaccagaaacttttatgcgaaaacacctattaatacaccggatgatctgaaaggcaaaaagatccgtgtacagcagagtcctgccagcgttgccatggcaaatgcttttggtgcagcagcagctcccatgggctttggcgaggtttatacagccattcagcagggcgtgatcgatggagcagagaacaacgagctggcgctgaccaacaataagcacggcgaagttgcaaaatattatacatacaacaaacatcagatggtgccggatatgctggttgcaaacctgaaattcttaaacagcttaagcccggaagaataccaggtatttaaagaggcagcccaaaagtccacagaagtagagctggaagagtgggataagagcattgatgaggcaaaaaagatcgcaactgatgatatgggagtggaatttatcgatgtggatgtaaatgcctttaaacagaaggtacttcctctccacgaaaagatgttaaatgagaatccaaagatccgtgatctttatgaacatatccaggaagcaaatgaggcagcagccggaaaggaaggcaagtaatggaaaatatgcgaaaagtaagaaaaaccatgatgaaagtgctgggctatctgatcattttcctgtttatgatgatgacagcagtgggaagctaccagatcattacaagatatttctttaaccggccaagtacagtatcagaagagctgctgacctattcctttacctggatgtcccttctggcgtctgcctatgttttcggcaagagagaccatatgagaatgggatttatggcagataaactgaccggaaatttcagaaaatatctggagatcatcattgacctgttatccttcagctttgcggcagttgttatggtatatggcggctgctccattacaaaactgaccatgatccagactacagcatctttgcgtgtgccaatggggtatatatacgtgatggtgcctgtaagcggtatccttattatgatttttgcggctatgaacgcagtggaaatgttccatcatgagttcaaagaagccggggaggtgagagtatgacaatcgcaggactttgcggactgattatatttgtgttgctggcggtcatgctgattgcaggcgtacctattgctgtcgcattagctgtttcttctatttgcgcgatcttaccggttttaaatatgggtgcaagcgtactgaccggtgcccagagaattttctccggtatctccgtattcagccttcttgccattcctttctttatcctggcaggaaacctgatgaataagggcggtatcgctatccgtcttatcaattttgcaaagctttttacaggcaatatcccaggtgcattagcccacaccaatgcagtggcaaatatgctgttcggtgccatttccggttccggtacagcggcagcttctgctatgggttccattattggacctattgaagaggaagaaggttatgaccgtgatttctctgcagcagccaacattgcaactgctcctacaggacttttaattcctccaagtaatgttatgatcacattttccctggtcagtggcggaacctctgtagcagctcttttcatggcaggttatatcccgggtatcctctggggccttgcttgtatggtagttatctacgttttcgcaaagaaaaaaggctatcgcagcacaaagaaatatactgcttctgaaaagatcaaagtatttttccaggcgatcccatgcctgtttatgatcatcgttgttatcggcggcattatctccggtatatttactgctacagaaggaagtgtagttgcagttgtatacagcatggtactggcaattttcttctacaaatccattaagccttctgaactgccaaagatcttccttgacagtgcggaaatgacgggtatcatcattttcctgatcggcgtatccagtattatgagctgggtcatggcatttacaggtatcccaactgcagtaagtactgctatgcttggtatcagcaataaccgttacgtgatcctgtttattatcaatatcctgctgctgatcgtaggtacttttatggacatgacaccggcgtgcctgatctttaccccgatctttttgccgatctgtcaggcactgggaatgaacaccattcatttcggtatcatgatgatctttaacctgtgtatcggaaccattacaccgccagttggaactacactgtttgtaggtgtaaaagtaggaaaaacaaggatcgagcaggtgatccagccattgctttattactttggagccatctttatcgtactgatgttagtttcctacattccagcgctgtcactttggctgccgggactgctgggatatgtataaaaaataggagatctgcctgctgaggcaggtggaaaggtgcagcagaacaggcaaggcgcataagaccccggaaattttataccccggggtctttttttgttgccaactttttttgcatatagtataatttctgatgataccaggggacaaagtttggaagaccgacgcaagcttgcttgcaggaggacttgcaaaattgggacccgccaaaaacatgagtaagaagccatttttgttaaaaaatgagcggattacgaatgttttctaggattgcgggagtacacagtgcggagcaatccggtatcatcaaaaagaccgaattacaggggacgcaaggcatttagcaatatgcagtggccctggtgacagaaaggaagaacgaacatgacaatcaggatcggtattttaggttatggtaatctgggaaaaggagtagagtgtgccattaagcacaatccagatatggaactgaaggcagtatttacaagaagagatccttccaccctttccattcttacagaaggcgcaaaagtttattcagtgaatgacgcacctgcaatgaaagatgagatcgatgttctgatcatctgcggcggcagcgctacagatcttccaaaacagactccagaaatggcaaaatatttcaatgtaattgacagctttgatacacacgcaagaattccggaacattttgaggcagtagataaggcagcaaaggaaagcggccatatcggactgatctccgtaggctgggatccaggcatgttctccttaaaccgtctgtatgaaaatgctatccttccaggcggaaaagattatacattctggggcaagggcgtaagccagggacattctgacgccatcagacggatcgcaggcgttaaggatgcaagacagtataccattccggtagaaagtgccttagaggcagtaagaagcggcagtgagccggaactgactaccagacagaaacataccagagagtgctttgtagtggcagaagaaggcgcagatcttaagaagatcgaagaagagatcgttaccatgccaaactactttgccgattatgatactactgtacactttatcagcgaagaggagctgttaagagaccatgcaggtatcccacatggcggcttcgtgatccgtacaggaaagaccggctggaacaatgaaaattctcatgtaattgaatacagcttaaaacttgactccaaccctgaatttacttcttctgtactggctgcttatgcaagagctgcataccgtttaagaaaagaaggacagactggatgcaagactgtatttgatattgcaccagcttatctggcagcagaagacggagcatatttaagaaagcacatgctgtaggagaaatactatgacttatgttcagagaaccatttgcccttatgactgtccaacatcctgtggactgttagcagaaaccgacggaaagaagatcttacgtgtcaaaggtgataagacccacccggccaataaaggtctgatctgtgggaagatgcagcattatgaggagtccataaacagtgaaaaaaggatccttacgcctcttcgccgcaccggcaaaaaaggcagcgggcagtttatgcccattacctgggaagaagcaggaaatgagatcgcagagcgttttctgaacatatgcagggaggatggcccccaggctatccttcccgctgtctattctggagtcatgggccagatccagagaaagtgcggggaagcattttttaaccgtttaggtgcctgttccctggtactgactctctgtgcatctgctaaaggtgccggttacagtgccgttgccggaaaaaccggctgtctggatccgagagaactggaaaacagcgatttctttctcatctggggaagcaatatcatggctaccaggctgcagatcttacctcttcttgccagaaaacggaaagaaggaaaacaggtgatcctgatcgaagcctgtggcagagacagtgcctctctctgcgacaaagcggtctatatccgtcctggaacagacggggctttagctcttgccatgatgcatgttctctggcgggagcatttagaagatgaggatttcttaaggaaccaggcggatggctatgagcagtttttaccggagatccggaaagctacgcctgaatgggcacagggcattacggggatccctgctgaggtgatcgaagaactggcacatgtttacggaaaagcaaaagcgcctgctattgtactgggaagcggtctttcccgttacggaaacggtggaatgaccgtgcggctgatcactatcctttctgcttttacaggagcctggaagcggccaggcggtggcatctgcggatgcgaccacaatctgggtgattttgttgatacaaagcggatcacaagaccggatctcagaaaagaaccggcacggatcgtaaatatcaaccagctttcatctgctttaaatgcagaaggaaaagataagatcagggctttttatgtatatgcaggaaatccggtgaattctgtatgcaaccagacggggcttttaaagggagttgcgagggaagacctgtttacagtggttcatgagcggtttatgacagatacagctctttatgcggacattatcttaccggccactttttctgtggagcagacagactgctttaagccatacggatatggtacttttgcagtggctaataaaatcattgatccgccgggacagtgtaagagcaactgggataccttctgttttctggccgggaagttgggatttgaggaagattactttaaacagacagcagaagatgccctggaggatctgctttcccatcccggaaaggatctggcgcggctgtcagaagaacagtggcagtttttaagagaaggcggcacgatttctgcagattttgcggatcactgtgattttaaaacaccttccgggaagtttatgatcgtaaataagtcgttgaaggatcctgttccccactatataccgtgttacgacggtacatatccattccatctgatctcagtgcctgacagtcataccttaaattctatttttttggagcgtgacagtctggtggaaaacagaggccccatgtccctgttgctccatccacaggacggagcagaactggggatccaggatggagatccggttacagcctggaatgacctggcagaggtagaatttaaggctgtgtttacagatcagatcgccagaaaaacagcagcagcatccggcgtgtacagctcctctattaccgggcagcgttttcaggtaaatgccttaaatcatgaacgcctgtctgatataggtgaagctacgacactgaatgataacaccattaacataaaaaggagtaccttttgaaacagtattttgtaccatttaaagaattacgttccctgacaagaggagaaaaatttgcagtattgtccctgatcccgttatatttcattgtcattggcctgtttcttcagccaatcaacgagatcattccgggaattatacggatcgtgcgggagccggacgtactgatcacagactattttgcagtaggaggaattggagctgccctgatcaatgcggggcttacaactctgctcagcattgcccttctctatttttcgggaaaggagatggacggtcataccattacttccagctgtctgatgttcggattttctctttttggaaagaacattgtcaacatctgggccattatggcaggtgttgttttgtatgcgaaatatcatggtacttctttaaaacgttatctgtatgtaggtctgtacggcaccagtctttcccctattatgacacagatgatgcatatcggaaaatttcctgcgccggtctgtcttatgctgtcactgcttttgggacttgccatcggctttgtgctgccgcctttgtgtacccatgtgcactacgcccatcagggatattccctgtataacgtaggatttggcgcaggtattattgcaacggtagtagtatctcttgctaaatctttcgggatcaaagtagaatcccgcctgatctggtctgttggaaataataccctgtttgctgttttacttatgtctttatttggctgtatgatcgcatcagcagtggcagtgcggggaaagacgatcctggagtcttatagacgtatcctgaaaacatcagggattggtggaaccgattatctgaaagatgaaggcggagctactactgtatttaatatgggtgtcaatggactgtttgccactctgttcgttctggcagtaaaaggggatctgaacggtcctacgatctgtggtatttttacgatcgttggtttcagctccacaggaaagcatttaagaaatatcgcccctatcatgtttggggtctatcttgcaagctttaccaaaacatgggcgattaaccagccatcccctatccttgcgctgttattttccactacactggcgcctgtagcaggaaggtttggcccggtggcaggcattattgcaggttatcttcattcttctgttgctttaaacgtaggaattgtatacggaggcatgaatttgtataacaatggttttgccggcggtattgttgcaatctttttagtacctgtggtacagtcgatcagtgacagaagagcaagagcgagaggcgagctgtccctgtagtgttctgcctgctgatgggaataaaaattccaaaaaacatgaaatatgggaaagaaggaaattgactatatggatgaacgtttgaaaaaacagctggattttgccctggagatcgataaggaaaaaaatattctccgccagactcatttatccggtcacggaagaaatgaaaatgacgcagaacatgcgtggcatatggcgatcatggcctatcttttacgggagtattccaatgagcctgttgatattaccagagtcatgcttatgtgtctgatccatgatgtagtggagatcgacgccggggatacttatgcctatgatgaagaaggcaagaagacccagaaggcaagggaagaggcggcaaaagaacggatctattccctgcttcctgaggatcagaaagaggaactggcagctatttttgacgaatttgaggaaagtaagacaccggagtcaaaatttgcccatgcaatggacaatcttcagccattgatgcttaacaacagcaatgacggaggggactggagagaacacggtgtcagtgcaaagcaggtttacggccgccagagccgcacaaaagaaggttctgaaaaactgtatgaggttacagatcagatcataaaaaaacatagggagaaggggaatttaaaatgaaattagcagttatctatgactcaaaaacaaataatactgcggcagtagcaggctatatggcagaggcaatgaacagccttgaaggggtagaggcaaaaacattcctgtattcagaagtagatacagagtttgtaaaagagtgtaaaggcgttgtgtttggctgtcctacttatgcagctggtcctacatctgatttttatacctggatggagaaaaatgcaggcggtctgaatttggccggaaaattaggcggtgtatttgctacagaacagtacatccatggcggtgctgacctgactatgaacgcgctgctcatccacctgttagtatatggaatgatgatctattccggcggagcttcctgtggcaaaccagtgatccacatgggaccggtagaagtcagcccaaagaaagaagatttcaaagaactgtttgagatctttggcaaacgttttgcaacacaggcgttaaagatcaacggataaacctattatcaaaaaggaaactacgaaaaatgaaaacagcaggaaacaacagaaaaaccacatcaaaccgagtggccctttatggtcttcttatagctctggcctttgtattaagctatgttgaaacattattccctgtttatctgggagcgccgggcgtgaagctggggttagccaatctggtaacagtcattgccctgtatggcctgggagtgaaagaagcctttgccattaatgtagtgcgtgtattgttatccggctttacatttggaaatatgtcgtcgatcctgtttggtatggcaggagcagttttaagtctgtttcttatggctgtatgcaaaaagctccgcctttttgatatgaccggtatcagtatcataggcggagttgcccacaatatcggccagtttctggtggctgcatttgtgacaaaaacatttggcgtattttcctatcttccggtactgctgatcgcaggaaccgtggctggagcactgatcggacttttaggcgggatcattttaaaaaggatcagtaggatcttaccgaaaggataaaaaactgtttataaattatttagataaaaaagattatttttttaaacttaaagagtatcctgaaggtaatggacatgatacaggaggttttagagaatggattttatgatcttagacgggatccagaaacttcacagtccccttctggatactctttttgtatgtatcacccgtttgggagataagggatttgtctggtgtcttatggcacttgtctttcttttgatcccggaaaaacggaaaacaggctttatttgtgtagcagcccttcttcttacggaaataaccggaaatcacattttaaagcccttatttgccagggtacgcccctgcgatgtaaatcaggctgtacagcttcttattgcgaatccaggtggatattcatttccctcaggacatacgtctgcttcctttgcggcagcgtctgttttgcgtttcagggagaaaaggaaagtggcagtatcggctcttctactggcagcattgatcggtttttcaagaatgtatctttatgtacattatccgacggatattgcaggcggtattctcttgggaacactgatgggatatgtctgtgtacaggctgcagacaggataaaatacaggaaaaattcaataaacatcgaaagaaaatgacattgttttatgtatcccctgtgattataatgaaaatatcagcaaatttatccgcagagcattaaacggtctggtggatttgcaaataaaaagggggatatgcagatggtttacgaagcaatcagagaattggtacgttacgggttagagaagggcctgatcacagaagatgatgccatttatgccagaaatcagatcctggaagtattaaaaatggatgaatacgaagagccggagaaagatggggaacttacaggcgcagctctggagaagatcctgaaggtacttcttgactatgcagccgaaaaaggacttttacaggaaaacagtgttgtatacagggatctgtttgatacaaaactgatgaactgcctgatgccaaggccaagtgaagtaacaaaaacattttgggagaaatatcaggtttcgccggagactgccaccgattactattacaacctgagccggaattccgactatatccgcagataccgtgtaagcaaggatatgaaatggaccacagataccaaatacggtacactggatatcacagtcaacttatccaaaccggaaaaagatccaaaggctattgcagcagcgaaactggcaaagcagagcggttatccaaagtgtcagctttgtatggaaaatatcggttatgcaggcagagtgaaccatccggcaagaaataaccatcgtgtcataccgatcaccattaatgacagcaagtggggatttcagtattcaccttatgtttactataatgagcactgtatcgtgttcaatggccagcatatcccaatgaagatcgagcgggctacattcagaaagctgtttgattttatcagccagtttccgcattatttcctgggatccaatgcagatcttcctattgtaggcggatctattttaagccatgaccatttccagggcggccattatacctttgcaatggcaaaagcacccatcgagaagtattataaggcagaaggatacgaggatgtagaagcaggtattgtttactggccaatgtccgtactgcgtctgcgttctaagtcctgcgactccctgatcgatctgggggataaggtgttaaaagcatggagaggctatacggatgaggcagctttcgtgtatgcagaaacagagggagaacctcataacaccattaccccgatcgcaagaaaaaacggggatatgtatgaactggatctggtgctgcgaaataacattactacagaagagttcccactgggcgtttaccatccacatcaggaactgcaccacattaagaaagaaaatatcggtctgatcgaagtaatgggactggcagtgctgccatccagactgaaaaaagaactggccgaactggcggagtacatagtagaaggcaaagatatccgcagcaatccggatattgaaaaacatgcggactgggtggacagcttcctgcctgtatacaaagaaaaaggcattgagatcacaaaagacaatgcggaagatatcttaaaagaagaagtgggtcaggtatttgccaaagttctggaagatgccggtgtttataagtgtacaaccgaaggaagagaggcttttgagcgtttcctgaatacagttgattttcataaagagtagagataaagggtcccgcctggtggcgggacctgttgttttgagaaataccggtgatacgtccggagattgcctttgggtgcagtgctgttttttggtggttagttttcatcctcttccagcttgtgaggcagccgcccgcgcaggaaccgcttctttaactcatttaagtgaaatgggatcagagggtaaatataactttttcctgcaatggtcctgttaaagataatggcgcagaaagagaagataataccgatcacaaagccccagatattgaaaatggcagtgcagatcagtatgatgatgcgcataaatttcatggcgtagccaagttcaaagctggcctgggaatagttggcaatggtgacaaaggccatatacagcatggtttcggagttgaaccacccggactctaccgcatattctcccagcacgatacctgcgataacgctgagtggcgtagtaagcatgttgggagtgtttaccgctgccaggcgcagaccgtcaatggcaaattcaaggatgagaagctgccagatgagaggaatattacaggggtcagacagccgtataaaccggagccagtgggggatcagctccgtattttgcatcagcattagccaggtaggtgttaggagcatggagagcagggagatcagcatgcggcttaaacgcagataggtacctgtaaccggcggaaagtaataatcgtctgcttcttcaataatatcgaatacagaagagggcaggatcatggcagaaggagaattgtccaccaggatcacgatatttccttctaaaatagaggctgcagaggtatccggccgttccgaaaacttaaatttgggaaacggattaaaccattttcccggaaaaatacattctgccagactttcctggttcatggaaagggcgtctacttttacattctgtatcctctttttgatcgtctcgatcagttttttatctgcccggccttccatataacacatggcaatatctgtgtgggagctttctcctgtagtaaggatctccatggtcagcttggggtcccggatcctgcgacggatgagagctgtattaaataccagcgtttctacaaaaccatctctggaaccacgcatgaccttgtctttttccggttcactgactcctctggcgggataagtacggcagtcgatggtaagacacttgtcatagccgtcaataaaaagacaggaaacaccggaaagcagctgtatgatcatttcacggctgtcagataaaagaccgatctcaccatagggcagatatttttttgaaaagctgtgggcatcttctggcatatcatcagctttgatagaagaaaagccctgtaatatttttaagagagagtcatcttttgtaaaaccatcaataaaatacaggcaggcttttttatctgcaatggtaaggacgcggtagacaacgtcaaaatttttatccacatgaagggcctggttcagccaggtcatgttttcttccagctggtccgtaaaatacatggaaaactcctttctgctgacaaaaccacaaaaggacaaatgtctgtcatacaaagacaaaatgtgaattacttggcaattatgtgaaataacacacaaacatttccgcaattgtcagacttgtagagtagtatatccggaagtcagaaaactatgtaaggtctttaagggatatgttacatctgccagtgagaaaccggaccaaaatcgacaaaaaccgacgaattttataggataatacctaaaaaaataaaaggtatttgctaaaatgcacaaaaagattgacaaaactgtgaaacgatgctatagtaacattcgtaagcagcacaaaggagtgccttacaggtttttgtttggtatggggatgccagcaatattttatagtgtgacggtttttgatcgtgactaagagctgccttctgtgggggaagggcagctcttcttgtatctgtgagaaatacaaacagagtggcgggaggacgggataatatgggaaaaacaagcagtttgaaaacgatacttgaacagataaaacttctgcaaaaagataagaaaatacgcctggtgatcactatggctgcagtgcttctctctgcttttatccaggcctgggccatccaggtgtttgtaagaccggcagagatcatttccggtggtttttccggtgcggccatgctgatcgaacgtgtgggaagtttaaaaggactgactattcccatgcaggtgacaatgatccttttaaatatcccggtagctcttatgtgctgtcgtgggatcagtgtccggtttacagtggtgtcactgcttcaggtcgtatttggaagtatatttttgcagatattttcatttcagcctatttttacagatgagatcttaaatgtgatcttcgggggcgtgatctatggtacatccattgtgatcgcactgaggggcaatgcatctaccggtggtacggactttatcgcgctgtatgtatccaataaaacaggaaagtccatctggagttatgtattctttggaaatgccttaatgtactgtgtatacggtgtgatctttggatggaaatttgcgggatattccattattttccagtttatatccacgcatatgatctcagctttccaccaccgctacgatctggtgacacttcaggcaacaacagaaaagggaccggaagtggtagcgctttatatcaaacattttcgccatggtatttcctgtgtggaagcagtagggggatacagcggaagaaagatgtatcttttaaatacggtgatctcctcttatgaaatagcagatgccgttcatgtgatgcaggaggcagatgagcatgtgatcatcaatgtgttgaaaacagaacagtttgttggacatttttacagggcgcctatggagtaggcgtccttttttggacccaaaataactgcaaaagcaggtgaaacaggcgtttaaggcaaaaaaataaagccctggcaagtgtggtagtagtggtgcagggctttataaaatgtacagaacaggcgttctgaacactctgagtatacagcagattgaacaaatagtcaagaagaatttgtgctggcagcgccagcgactatgtttttgtggagaattgtgctataatgagcgcaaaagaaaagcaagcgctgcataatgcagcatttgcttttcttgcgccattaacgaacggatcgcctgcgtcagcaggcagtagagcacgtcagtgcgggatccgtgagtgacccggtaacgaaggaatacacggaggacacaatgaaagacggatttataagggtagcagcggcaacgccagacatccatgtggcagacccgcagtataacagcgaacagatcatagaattaatggaacagggaagcaccagaggtgtaaaggttatggcgtttccggagctgtgtttaacagcgtatacctgttctgatttatttttacaggagtctctgttaagagaagctaaaaaagaattaaagcgcattttacaggcgtctaaaagcaaggacatgatcctttttgtaggaatgccctggatgcataaaggaaaactttacaatgtggcagctgtgttaaacagaggccgtatcttaggtatcgttcctaaaaaacatctgccaaattattctgaattttacgaactgcgccattttaatccgggaatggaaaaagtggagatgacagactgggaaggcgttcaggtacctatgggcatgaacctgctgtttgcctgccgcaccatgccggaactagtgctggcagcagaactttgcgaggatgtatgggtaccatgcccgccaagtatttcccatgctttggcaggtgcaacagtgatcgccaactgctctgccagtgatgaaacgacaggaaaggaccagtatcgttataacctgatctgcggacagtctgcaaggctggtgtgcggttatatttatgcaaatgcaggagaaggggagtcatcccaggatctggtatttggcggacagaatatcattgcggaaaacggcacctgtctggtacagtctgaccggtttaaaaatgcctgcatctgtgcagatctggaccttggaaggatcatcagcgagcgccgccgtatgactactttcagggatgaggaaaacagatccgcatcctacgaaaccgtatattttgaattaaatacagaagacagtgcaaagaaagacagtaaaaaagcaggacagaagagggacgaacttctccgttatattgatccggctccatttgtgcctcatgatgcaggccagagagagcgccgctgcgaagagatcctttcgatccaggcaatgggactgaaaaagcgtctggcacatacaaactgcaaacatgcagtgatcggtctttccggcggtctggactccacactggcacttcttgtaacagtacgtgcttttgatatgctgcagatcccaagagagaatatccactgcatcactatgccatgtttcggaacaacagaccgtacttataccaatgcctgtaccatggcaaagaaaacaggagcatctttaactgagatcaatatccgtgatgcggttaccggccattttaaggatattaaccatgatattgaaaagcacgacgtaacttacgaaaacggacaggcaagggagcgtacccagatcttaatggatattgcaaacgaggtaggcggtatggtcatcggtaccggtgatatgtctgagctggctcttggctgggcaacctacaacggcgatcatatgtccatgtacggtgtcaatgcatctgtgccgaaaacattagtccgccatctggtacgttattatgcagatacctgcggcgaaaaggaactttccgatgtgcttttagatgtccttgatacaccggtaagcccggaacttctgcctccggaagatggaaaaatttcccagaaaacagaggacctggtaggtccttacgagttacatgatttctatctgtattatgtactccgttttggctacagccctgcaaagatcttccgtctggcgcttcaggcatttgagggaagttatgacagagagacgattttaaagtggctgaaaacattttaccgcagattttttgcacagcagtttaagcgttcctgtctgccggatggcccaaaggtaggttctgtagctgtttccccaagaggtgatctgcgtatgccaagtgatgcctgcagccgtctgtggttaaaagagctggagatgatagaaaaaggagaaagataatatgataaacagtacctccaataagcaggtaaaacgggtcatcaacctgagggataaggccaaagcccgcagggaagaaggcttatatgtagcggaaggactgcgcatgtgccgggaatataagccggatgatgtggagatcttatatattacagaaaactttggaaaacaggaagaaaataaaaaatggctgcggggctttaagtttgagtttgttacagatgaagtaatgcattatatggcagatacaaagaccccgcagggcgttttagcagttgcaaagcagaaaaagtgtaccctggaagatatcttaaagaagacaaagacacagaaacttttaatgatcctggaaaatatccaggatccgggaaatctgggtaccattatccgcgctggagaaggcgcaggtattaccggtgtggtcatgagcagcgatacagcggatatctacaatccaaaggtgatccgttctactatgggatctgtgctgcgtgtaccatttgtgtatgcctctgatctgaaagaagcctgtgagcagatgaaaaaagcagggatcagtctgtatgcagctcatttaaaaggcatgcataattatgaccaggaagactatactaaggatacagggttcctgatcggaaatgaagctaaggggctgaccgatgagatggcggctgttgccgatacctacatcaagatcccgatggcaggccaggtagagtctttaaacgcagcagtggcttcttctgttttaatgtttgaggccgcaagacagagacggaattcatagagtacatcttaaagaagggagtgcaggaaaatgacaggtatttgtggctggtttcttgcatttctcttctttttaggtgcagaatgtatctgccggtgcctggtatccttgtggtttgcttttggagcagtagctgcctttgttctggctgttttgggaagacagatagaggaacagcttcttatgtttgtcctggcttccctggcagcatttctgcttataaggccgttggcgtttctgggaaattttttgaaaaacttaaaaacaggggattttcctgtaaaaacaaaaaagaaggtgggcggacatggagctgaagctggatacaaataaggaatatggtcttgtactggaaggcggtggcgccaagggggcttaccagatcggtgcatggaaagcgttaaaagaagcggggatccatgtaaaagggatcgcaggaacttctgtaggagccttaaatggcgctcttatagccatggatgactttgaaaaggcggaaagaatatgggagaccatccgctattccagagttatggatgtagatgatgaactggtggaacagttaaagacctccagtttaaaggatattgcggccctggggctgtcagaactgatccctgctgctaaaaaggtattaaaggacagaggttttgatattgcacccctgcgcagcctcattgaagaagtggttgatgaggaaaaaatacgaaactctgaaaaagagctgtatgtagttacttactccttaagtgacagaaagcccatggtagtcaatgtaaaagaagtgccggatggcgagatcgcagatatgctgatggcaagtgcgtatctcatcggctttcgtcgggaaaagctgggcggcaaatattatatggacggcggtggggtgaataatgttcctattgatgttttaatagaaaagggatacaaggacatcctggtatttcgcatctatggatatggtgttgatacggagcgccgcctgaaagtaccggatgatgtgcatctttatcacgtagcccccagacaggacttgggcggtcttttggaatttgacagaagacgggcaaggaaaaacatggttcttggttattttgatgccaaacggatgctttatggactggaaggaagagctttttatctggatgccccggaaagcgagatctactattttaacaggcttttggcagaggcgccggaactgttggcagatatctggccgcagctttcagaaacagaactttttacagcccagatggcttcctgccgcagatatacagaggagtggtttcccaagctggcaaaggcattacacttaaaagaggactgggattacagggaattatatttaagtttgctggagcatctggcaaggcagtataagatcagccgctttaaaatatacacaccccaggaactgcttcttatcatacagagaaaaagaaagcggatttttcttgacaggtaaaaatacaagtggtatattatgcataaaagttgcataaatataaatttttaaaatatttcaaaagaggaaacgattatgaatttaaagggaagaaattttttaacactgaaagattatacagaagaagagatcacatacctgcttgaccttgcagcagaattaaaggaaaaaaagaaaaaaggcattttagtagataccttaaagggaaaaaatgtagctctgatctttgaaaagaccagtaccagaacaagatgtgcctttgaagtagctgcacatgaccttggaatgggttctacctatctggatccatcaggttcccagatcggaaagaaagagagcatcgctgatacagcaagagtattaggccgtatgtatgagggaatcgagtacagaggttttggccaggagatcgtagaagaactggctaaatatgcaggcgtacctgtatggaacggtctgaccaacgaagatcatccaacccagatgttagcagatcttttaaccatcagagagcatttaggacaccttaagggagttaagcttgtgtatatgggcgatgcgcgttataatatgggtaactccctgatgatcgcctgcgcaaagatgggtatgcactttgttgcctgcgcaccaaagaagtatttcccagatgaagcattagtaaaagaatgccaggaatttgcagccatcagcggcgctaccattactcttactgaggatgtggcagaggctgttaagggagctgatgttgttgatacagacgtatgggtatccatgggtgagccagatgaagtatggaccgagagaattaaagacctgactccttacaaggtaacaaaagaagtaatggatgcagctggtcctcaggctattttccttcactgcctgccatccttccatgacttaaagaccaaaatcggcaaggaaatgggagaacgttttggtgtatcagaactggaagtaacagatgaagtatttgaatccagccagtctgttgtatttgatgaggctgagaacaggatgcataccatcaaggcagttatgttagctactttaagcgaatgatctgagcaatagggcgcaaaaagccgaaagaagcatcctggaaaacaggagattgagatatgcagggccagagaggaagaaatgagcgtcgcgccggtgtgtttttagatgtggcgcacttgatcctgggaatcgcgatcgtaatatttgcagtgctgtctattattaatccggagggaaatgaaatgcttttccctctggtatttttactggcagctttgttaaatggaataaacggagtcttcgagcttaagacttgtggcagggacaagaaacgtttccgcatgggggcgtttcagatggtactctgtgcaggccttgggcttcttggcgtgttaagcgctctcagtttatggttttagacgattttcagcgattttaaagaacaggatcagaaagagaatgaaagcggagattttaaagatattaaaaaaagaaaaagattatgtatcaggacaggaactttgtgaaagcctgggagtttccaggactgctgtatggaaagccatccggcagctggaagaacagggctatgtgatcgaggcagtgcgcaacaaaggctaccgccttgtggaggaagcagatgtgcttacagtggcagagcttcattcggtccttgatacaaagtggcttggaaaagagctggaatattattatgaaacagattccaccaacaaccgggcaagggatgcagcggaaaaaggtgcttcccacggctttcttgcagtggcagactgccagacagcaggaaagggccgcaggggaagagtgtggaattcccctcatggaacagatatttatatgagtttcgtcctgcgtcctacatttaccccatcccaggcgtctatgctgacgctggtagcgggaatggcagtggtaaaaggggtacagaaagccacgggcttaagtgccatgatcaaatggcctaatgacgcagtagtaaatggaaagaagatctgtggtattttaacagaaatgagcacagaggaagatgccatccgctatgtagtacctgggatcggtatcaatgtaaatgcaacggaatttccggaagagatccgggacaaggcaacttccctgaaactggaactgggaagaagcgtaaaacgcagtgatgtgatctgtgcagtagcagaaagttttgaagaatattatgagatatttgaaaagacttgtgatatgtcaggacttctttctgcatacgatgaaatgttagtcaatatggaaaagacagtctgcgttttagatccaaagggtgaatatcggggaaaagcccttgggatcgatgaagaaggctgccttttagtagaaaaggagaatggggaagtcgttcatgttctttcaggggaagtatctgtaagagggatctacggatatgtgtaaggaaaaacagtatgggggcagtctgcatttttatgatgatctgcagatcctggaacgggaggatgaacctttaagcaggaaagaacgcttacaggcagtggaaaaaccgctgctttcatggtatcattccagagcccgtatcctgccctggagagaggatccgaagccttacaaagtatggatatcagagatcatgctccagcagaccagagtagaggctgtaaagccttattttgaacggtttatggcagcatttcccgatgtggcatctttggcagaggcgcaggatgatcatttgatgaaaatgtgggaaggccttggttactataaccgggccagaaatttaaaagcagcggccattcagatcatggatcagtttgacggctgcattccatcttctaaggaagaacttttaacacttccgggaattggcagctacacagccggggcgatctcttccattgcctacggggttcctaatccggcagtggatggaaatgtgctccgggtgatctcaagattacagggtgactattctgatataaaaaaggcgtctgtaaaaacggccatggaacaggaaatagcagctgttatgccaaaagatgcagccagcagctataatcagggactgatcgagatcggtgccctggtgtgtattccgggaggagagccaaaatgcagggaatgtccgctggagtctttatgtattacaaagaaaaagggactgtggaaggagatacctgtaaaatcggttcccaagcctaaaagaatggaagaaaaaacggtctttttagtagaatggaaggagaaagtagctatccacaaacggccgccgaagggccttctggcttccctttatgaacttcccaatatagaagggcatctgacaaaagaggaagcggcagagcagataaaaagctggatctgggaaggtgatgggaaacaggaggagaaaaccaccggcattacagtggaacctttggggacagcaaaacatatcttttcccatgtacagtgggatatggtggggtacagagtaaagatcgcctgggaaaatgaaaaagaaccagggaaacttttagaaaacacgcatttttttatggttgacagggcagcgttaaaggaagagtattccgttccgtctgcttttggagcttacgtaagactacttggataaaatacagaaagaatggacacaatgaaagcgagggatgcaggatgaaaaaaatgctgtttctttttaatccacgttccgggaaggagcagatcaaaagtcatttgctgcgaattctggatattttttcaaaagccgggtacgatattcatgtacatgtgacccagtgccagttagatgcaagaaagacagtggagcaccttggaaaaaatgtagatgtgatcgtctgcagcggtggagacggtactttaaatgaaactatatcaggaatgttacagctgaaaaagaccccttctttaggctatattcctgccggatctaccaatgattttgcctccagtttaaaaatttccaaaaatatggaaaaagcagcccgggagatcgtaaatggtttcccggtaccggtggatgcaggtatgttctgtggcgaccgcagttttatttatattgcggcatttggcgcatttacggaggtatcttaccagacgccccaggaccggaaaaatctgttagggcatcaggcgtatatgatcgaaagcgtaaagagtctggcttccatcaagccttatcacatgcgggtagagtgggacgatcatgttttagaagaggattttgtattcggaatggtgactaatacaagaagcgtaggcggctttaaagggctggtaaatcagtccgtatccttaaatgacggtgtttttgaggtcctgctgatccggatgccaaagactccgttagatctaagcaacattatttcttatatgttcctggtggaagagccaaacgaatatgtctataaatttaaggcttccgctattcattttacgtcagaagaaagcgtagactgggtactggatggggaatacggaggcgcaaggacagaggttacaattgaaaacctgagagagaggatccctttccttcttccatataaaatgtaacagttcagtcactttaaaaaaagttgtcgattgatgttgaaaaaaataaaaaactggtatataatgataagttgtgggagtatccacgtttacctttaagcgaaaggacgtttatcattggaaaaggacgattttttaaaaaagctggaaaagctggttgcgcatgcaaaatccaagcataatactgtggatgcaggcgagatcaacgatttttttgtcggagataacctttctccggagcagatggatcagatttacagttacctggagaaccgtaatatcgatgtagttcccgtactggacgaagcaatgttgaatgcagatcctgctctggatgatatcgggcttgatcttgacttagatgacgacagctttatgaaagatgcggaagatgaggatatcgatcttgacgcagtagatcttttagagggtattggaacggaagatccggtccgtatgtatctgaaagagatcggtactgtacctcttcttacagcagacgaagaactggagcttgcacagcgcaaggcagatggggatgaagctgccaaggaaagactgatcgaggcgaacctgcgtctggtagtcagcattgcaaagcgttatacaggtcgtggaatgagtttcctggatctggttcaggaaggaaacttaggactgatcaaaggcgttgaaaagtttgattatacaaaaggttataagttaagtacatatgcaacatggtggatccgtcagtccgtaacaagagcactggcagatcaggcaagaaccatccgtgtaccggtgcatatggtagagaccatcaacaagatgtcaaagatgcagcgtaagctgacactggaactgggctatgagccttctgttgcagagctggcagaagcacttgatatgacagaagataaggttatggagatcatgcagatcgccagagaaccagcttcccttgaaacaccaattggtgaggaagatgactccaacctgggagatttcgttgctgacagcaatgtagtgactccggagggaaatgtagagtctgttatgttaagagagcacattgacgcacttttaggagatctgaaagagagagagcgtcaggtcatcgtgcttcgttttggtctggaagacggacatccaaggacactggaagaagttggaaaagaatttaacgtaaccagagagcgtatccgtcagatcgaggcaaaggcactgcgcaagcttcgcaatccggtaagaagcaagagaatccgtgatttcctgtaggatataatgagcgcaggaagccttcgaacgcgtcactggcgcgttttcgacatgcatggcaaaacaagcggctgcgtcagcaggcagtggagcgcagcagcgcgtgaacctgagtgaaattgggcacagtgaaatagaacacttaaaaagggcggctttaaggagcggtccttttttactggattttaagggaatgaaaactacagcttcgccatcaggcgaacaagcgatagaacacaggaggccatagatggcagcacagcagcagaaagaaaattaccagagggtactggatcagaccatagaacagcttacaaaagagggaaaggtgccgatgcttctccttcacggctgctgtgcgccctgcagcagctatgtgttggaatacctttctaaatactttaagatcacgttattatattacaaccccaatatttccctaaaagaggaatacgaggcccgtgtaagggagcagaagcgcctgatcggggaaatggactttgttcatccggtacagttcatggaaggaaaatatctgccggaggagttttacagggcagtaaaaggccatgaggaagacaaagaagggggagaacgctgctttatctgctacgaacagcgccttagggaaggggcaattgtagcgaaagcaggcggctttgattattttaccaccacactttccatcagccctttaaagaacgcacagaagttaaatgagatcggtatccgcttaggagaagaatacggagtgccttatcttaagtctgattttaagaaaaagaacggatacaagcggtctgtagaactgtctgcccaacatcatctgtacaggcagaattactgcgggtgtgtgttctcaaagcgggaagctgaacttagagaacagcagtcgaaagagcagtaatggcagcgaaggatagctgatataactgttataagcttaacaatattatctctgtattaacttgacatcaccactcagatgtaataaaatttacttataaggtccggcggaaagccgggaaccggcgtataaaaatgcgataaggagagtataattatgatcagcaagaatttaacagtagttaatccatccggtttacatttaagaccagcaggcgttttatcccagacagctatgaagtttaagagcgatatcaccattatctgcggtgaaaagaagattgttgcaaagagcgtattaaacgtaatggcagctggtatcaagtgcggaacagagatcactctggtttgcgatggcgaggatgaagaagaagctatgaagaccatcagccaggcaatcgaaagcggcttaggtgagatgtaatttttactccggaatgcaataaaagaagaagggtcatgccttgtaaggtgtggctcttttttgtgtactaggaaattccgttggaactccctggtacacaaaaaggcacgacctgccaacgatgcgcactcgcgcgatgatgaagtttgtcgcaagcgaccgcgctcggcgcgagaatgtgccaaggcacattcttatttgtacgtgcacagtctgctttccgtaaacaattatgatgcccctccgtttcgcttaagaatagaaagtgaaaaattaagaaaataaagtgtgtcaaagggctgattttacacgaacaatagagataataaatgcaaaacacttcaaaatattctaacaaaaataataacaacattaaataatctaattatctgacaatatcacgaaaatcaattgtttacaaatgagaaaaatagtagtattatctgctcaataaaaaagtgctgatgcttatacgtcttaccccaactgtgaaagaacatcccccatatcgttctttcctgtgacataagcttagaggaagatcccatttcctgaggcacgtaaagaaaggaagaacactatggatcccaaacataaactgccgggactgtatgaccctcgttttgagcatgataactgcggtatcggtgcagttgccaatatcaaaggcatcaaaacacataaaacagttgaccaggcactccacattgtagaacacttagagcacagagcaggtaaagacgcagagggaaagaccggtgacggtgtcggtatcatgcttcagatctcccaccgtttctttaagaaagcagcagcacaggctggtattaccttaggcggtgagagagaatacggcgttggtatgttcttcttcccacaggatgaacttgccagaaaacaggccatgaagatgtttgagatcatcgtcaagaaagagggacttaccttccttggatggagagatgttcctacaacaccggatgtattaggcaaaaaagcagtagacgttatgccttacattgtccaaggctttgttgcaaaacctgccaacgtaaagaaaggattggactttgacagaaagctgtatgtagtccgccgtgtatttgaacagagtaatgaagatacctatgtagtatccttaagcagcaggaccattgtatacaaaggtatgttcctggtaagcgagctgcgtctgttctttgcggaccttcaggataaggattatgagtctgccattgccatcgtacattcccgtttcagtaccaacaccaatccaagctggatgagagctcatccttaccgttttatcgttcacaacggcgagatcaacaccatccgcggcaacgtagataagatgctggcccgtgaagagaacatggagtctgagtattttaagtacgatatgcacaaagtccttcctattattaatcaggaaggttctgactcagccatgctggacaatgccctggaatttatggtcatgagtggtatggacctgccgctggctgttatggtaactattcctgctccatgggaacatgataaatacatggactccgagatcaaggacttctaccgctactatgcaactatgatggagccgtgggacggacctgcatccatcctgtttacagatggtgatgtggtaggtgcaatccttgaccgaaatggcctgcgtccatcccgttactatattacagatgacggctatatgatcctttcttccgaggttggtgccattgatattgaccagacaaaggttattaaaaaagaccgccttcgtcctggaaaaatgcttctggtagatacagtagaaggaaaaatggtaagcgatgaggaattaaagctgcgctatgcagagaaaaatccatatggcgaatggctggactccaacctggtagaattagatgatctgaaagtaccgaaccaggcagctcctacacttacaaaagaagagcgtctccgcttacagaagacttatggctatacttacgagcagtaccgcaccatgatccttccaatggcattaaacggtgcagaagctgtttcagctatgggtgttgactctccgttagcagtgctttccaagaagcatcagccattatttaactactttaagcagttatttgcacaggttaccaacccgccgatcgatgccatccgtgaggagatcgttacttccactactgtatatgtaggtgaagagggcaatatcctggaggagacaccggaaaactgcaagatcctccgtgtagaaaatccgatccttacagaaaccgatctgttaaagatcaaaaacatgaaaaaacctggttttaaggtagaagtgatccccatcacttattataagaacacttcccttgaaaaggccattgaccgtctgttcctggaagtagaccgtgcacataaagacggtgccaatatcattatcctttctgaccgtgatattgatgaaaaccatgtgccgatcccatccttactggctgtttctgcccttcagcagtatctggtacgcaccaagaagcgtacaagtgtagcgttgatcttagagagcggcgagccaagagaggttcatcattttgcaactttgttaggttacggcgcctgtgctatcaacccgtatctggctcatgagtccatccattatctcattgagactggtatgttaaacaaagattattatgcagcagtaaaagactacgatctggcagtgcttcacggcattgtaaagatcgcatccaagatgggtatttccaccatccagtcttatcagggatcccagatctttgaagcaattggtatttcaaaggaagtagtggataagtattttacggatactgtaagccgtgttggcggtgttacattaaaggatattgaaaatgatgtggatgtgcttcattctgcagcttttgacccgttaggactggatgtagacctgactttggacagtgtaggaagccataagtcacgttcaggacaggaagagcatttatacaatcctcttactatccatctccttcaggaagcaaccagaagaggcgattacagcattttcaagcagtatacagatacactggataatgaaggaaagacctatcatctgagaaatctgatggactttaattatccggaagatggcggtatccccattgagcaggtagaaagtgtagactccattgttcgccgctttaagacaggcgctatgtcttatggttccatttcacaggaagcccatgagacactggctattgccatgaaccggatccacggtaagtcaaataccggtgaaggtggtgagagcctggagcgtctggttcccggtcctgctgacaataaccgctgttctgctatcaagcaggtagcttccggtcgtttcggtgttaccagccgctatctggtaagcgcccaggagatccagatcaagatggcacagggcgcaaagcctggtgaaggcggacagcttcctggaaagaaagtatatccatggatcgcaaagaccagacattcaactacaggtgtaagcctgatctccccgccaccgcatcacgatatttattccatcgaggacctggcacagctgatctatgacttaaagaactcgaatacaagagcaaggatctctgtaaaactggtttctgaggctggtgttggtactgttgcagcaggtgttgcaaaggcaggcgcacaggttatcctgatctcctcctatgacggtggtacaggtgcggctccaagaaactctatctacaatgcaggtcttccatgggagcttggtgttgcagaggcacatcagtccctgatcatgaacggactgcgtgacagagtggtactggaaacagatggtaagttaatgaccggccgtgacgttgccattgcctgtatgttaggtgcagaggaatttggttttgcaacagctcctcttgtaactatgggctgcgttatgatgcgtgtgtgcaacctggatacatgtccaatgggtattgcaacccaaaatccggaacttcgcaagcgtttcaagggcaaaccggagtatgttgtaaactttatgaagttcattgcagaagagctgcgtgaatatatggcaaaactgggtgtacgtacagtagatgagctggtaggacgtacagacctgttaaagagaaaagatgatattgaatacagccgtgcaaaagaagtagacttaagccgtatcctggacaacccatatgagggcgtaaaactggctggttataatgcaaaagaggtctatgactttaaattagatgagacagtagatgaaagcattttattaaagaagttaaagagtgctttaaataatggacagaagaagagcatccagttagatgtaagcaatgtaaaccgtactttaggtaccattttcggttctgagatcaccagaaagtacccggatggtctgccggaagatacctttaccatcagctgcaacggcagcggcggccagagctttggcgcatttatccctaagggcctgactctggaactgaccggcgactccaatgactactttggaaaaggcttatccggcggcaagctgatcgtatatcctcctcagggtgttcagtttaaggcagaggacaacattataataggaaacgttgcactttacggtgctaccagcggcaaggcatttatcaacggaattgccggtgaacgtttctgtgtccgcaactccggtgctactgcagtagtagaaggaaccggcgatcacggctgcgaatatatgaccggtggctgtgtagtagtccttggacctaccggaaagaactttgcagctggtatgagcggcggtattgcctatgtattagatgaagaccgtagtttttataagcgtttaaataaggaactggtttcctttgaagatgtctccaataaatatgatgtattagagctgaaaggcctgatccaggaacatgtagcatacaccaactctgaaaagggcaaacgtatcttagaccatttcagcgagtatctgcctaagtttaagaagatcgtgcctcacgactaccgccgcatgatgaatgccattgtgcagatggaagaaaaaggcttaaacagtgagcaggcacagatcgaagcattttatgcaaacatcagaggttaaggaggcgctgaaaaatgggaaagattacaggattcttagagtatgaacgtgaaaatggaaaggcgcttccaccaaaggagcgcattaaaaactggaatgaattccacattccgttaagtgaagaggaacagaaattacagggcgcacgctgcatggactgcggcgttcccttctgccagtccggcatgatgatgtgcggcatggtaagcggctgtcctttaaataacctgatcccggagtggaatgaccttgtatacacaggaaactggcagcaggcatttaaccgcttgaaaaagaccaactgttttccggagtttacctccagagtatgccctgcaccctgtgaagctgcatgtacctgcggtttaaatggcgatccggtatctattaaggaaaatgagcacgctattattgaaaaggcatacgaagaaggctatgcaaaggtaaaaccacctacagtgcgtaccggtaagaaagtggccgtgatcggttccggaccttccggactggcagcagcagaccagttaaataaaagaggacacagcgtaactgtatttgagcgcagtgaccgtgtaggtggcctgttaatgtatggcatcccaaatatgaagctggagaaatgggtcatcgaccgtaaagtcaatgtaatgaaggaagaaggagttatctttattaccaatgcagatgtgggaagaaattataaggcagccaagatccttcgtgattttgacagcattatcctggcatgcggcgcttctaatccaagaaatattgatgttcctggaagagatgctgctggtatctattttgcagtggattatctgaaggcaaatacaaagagccttttagactccaatttagaggatggaaattatatctctgccaaagacaaacatgtaattgtcatcggcggcggtgatacaggaaatgactgtgtgggaacttccatccgtcagggctgcgcttctgtgacccagttggagatgatgccaaagccacctgtaaagagaactgagaataatacatggccggagtggccacggatcctaaagacggactacggtcaggaggaggccatcagcgtatttggctctgatccacgtatttaccagactactgtaaaggagtttgtaaaagacggggaaggaaagctttgcaaggtgatcttagtcagtcttacaccgcagaaaaatccggaaacaggccgtaccatgatggtgccggtagaaggcagtgaaaaagaagtgcctgcagatctggtactgatcgcagccggtttcttaggatgccaggattatgtggccgatgcttttggagtagagcgcaatgcaagaaccaatgtagccacagaagcaggaagctacaagaccaatgtagacaaagtctttgtagccggagatatgcacagaggccagtcactggttgtatgggcgatcagagagggaagagaagtagccggtcaggtagaccgcagtctgatgggatacaccaatctgcattaaatatggaaagagttccgcctgttggcggatgtgtaacaccaattctgcagcagcaccccgccgtcaggcggggtgttttgcgttaccaatatgacaaaaatccaaaatttgtctattgccatatccgccgctctaacgtataataaaagttcaggttcacactttggacacaaaaggagcggcaggacatggcggtatttacgaaacttgtgatcatgagggtatttgaaaatctgttgtctgtgaaacccttagagaagataacggtaaaagacattacagaccagtgcggcatttcacgtaataccttctattatcattaccaggacatttatcaggtttttaaggcatatatagattattccctggaagaaatattcaaatttcttcagcaggaaaatgaaaaagaccaggatcatatttgtgaaaaggcagtagaattcctggaaaaccacaggaccatatttgaaaatattctccgttccgcaaaaagtgaggaagtacacaagatattagatgacggttccagccgttttttccgttatgtgattgaccgagtgggagaaggtattgattcagagccggaagacagagagatgatctgtgctatgtgccagcatgcagttggagaaattatgcatgaatggttaagcagggaaaatgcagataaaaagtcactgtcagatatcctgatgcgggccaattatctttttggcggtggattggaacgggctttagagcgaagcgcaaaccgcttccggaattgataaaatgtatcaaaataaatgataataaattaacaaattagtacacttaatagccgaatgtacaaaaactgtgcattcggttttgttttgtctattgctctttaaacaaaaatccatataatgattaattgtgactgagagaaggcaaaatttccccggtctcctttggcacatgaaagtgtgcatttgggacagcagcctggggaagaacaggagatgaagcaggatgccaacacaaaagttcataaatcttacggaaagtaagaagcagacgatcctcacagccatgtgcagggagtttatgaatatcccttattcagagatccgcatcagcaatctgatccagaaagcgggtatatccagagccagcttttatctgtattttgaagataaagaagatctgttaggttgtattgcagagtcctgggtagatgtgatattacgcaaactgacagaagcgtttagagtgtcagacggaagctattatgaaagcatgaagctttggatgagtcaggcactggaaaatgacatttccagagaagtatggaaagtctataaacgggtcatggaagaagaggatttcacaaggaaaagcaagatgggggctttacagtttaaggcaagtcccaagtggcgtcaggtcatagaagaatgttatggtcatatggaccagagcagatatccgggactgacaccggaaaaactggcatatgctgttgatatgggactgctggctatggtccagctttccatgcgctatgtagagcactatgctcctttggcagagttaaaggaggctgcatggcaccagctgacaatattagacaaagggatcagagagtgatccgaaagtttgagaaaaagaaaggaaggcacaggaaaatgaaaaaaaatgtaaaaagactcatcgcgggagcggtagttcttttggtagcagcgggtattgttgtccgtattgccggtggcaacaaaaaagaagaagaatatgaaacccgtccaaccgtagctgttgaaaatccaaaaacaggagatatcactctgtataccgatctgaccggtacgattgaaccaatctccaaggcagttgtacagccaaagatcggcggagaacttctggaggtaaacttccaggctggtgatcaggtagaagctggtcaggtgctttgtaagatcgactctgacgcactgactgctttacagcttcagatgcagtccgcttctgtagcagcagacaatgcagcaagagaactggcacgtatccagcctctgtatgcatctggctatatttcacagcagcagtttgatcaggcacagtcttctgcaaccagcgcccagctggcatacgagtctgcaaagaaccagtatgacctgcaggtagaatacactacagtaacagcaccgatcagtggtgtgatcgagtccagaaatgtagaaccacatgatcatattggaacagacaccaagatctgcgtaatctccggtggtgaccagcttcaggttaaatttggtgttacagaaaagatccttcgcaatatgaaggtaaatgatccggtccaggttgaaaagaacggtactgattacgaaggtaatgtaacagaaatcggcagtatggtaaactccgcaaccggcctgtatgacgcaaaggcatttgtaaacaatgcagaaagccttacaagcggaaccaaagtaaaactgactgtggttatggatcaggtaaaagatgtactgaccgttcctgtagatgctgtaaactatgataatggaaaggcatttgtatactgctatgacaatggcgctgcaaagaaggttatgatagaagccggtatttatgatgcacagaccatggaggttaagtccggactgactgcaggcgaccaggtcatcacaacctggagcaatgagctggtagatggacaggaagttcttatagacagtgacaatggacagaatgaaaatgcagcccagggagaaagcgctgcagaaaatgctggagaagaaacacagaaagcaggtgaataaaagatgttaaatctgacaaaatttgcggtacgcaagcctgtgaccattatcatgtgtttgctgaccattgcatattttggtatccagtccctgttagggaccaaggtagagctgactcctgagatggaattccctatgctggttgtcagcactgtttacgcaggagcaagccctgatgatatcaaggacctgatcgcaaccaaacaagaagatgcggtttcgtcattggatgatgttaaaaacgtttattccttctcacaggataacgtagccatcgttttagttgaatataattacggtaccaacattgatactgcatacatcaacttaaagaaagcgatcgacggtattaagagtgacctgcctgatgacgcaaatgagccaaatatcatggaaatggatatgaactcccagcctgttatcacactggctgtaggtggtcaggtagacggaaacctttatacatatgtagaaaacaatatcaagccggaactggaaaaattaggttctgttggtgaagtttctctggcaggtggccagaaagaatatatcagcatcaagctggatcctgaaaaagtagcgcagtatggccttagcatgtcacgtattgcacagtttgtaggtgctgcagactttaccattcctgcaggtgatgtaaacgtaggaaagcagaatctgtctgtcagcgtcggaaatgattttgacaacacagaagcactgaaaaatgtagcgatcccgctggcaaatggagatgtgatccatctttctgatgtggcaactgtttccaatgctttggaagatgcagattctattggccgttataatggtcaggacattgtatctgtatccattaaaaaacagcagagttctactgctattgatgtatcaaaagatgttttaaagcaggtaagtgtactggaaaagacttatccgggacttacatttaccgtggtcaatgattccagtgatatgatcaccgaatcaattaccaacgtattccagactatgatcatggcggtcattttgtctatgatcattctgtggctgttctacggagatatacgtgcctctgttattgtaggtacttctatccctatttcaatcatgctgaccctgattgccatgtcgcttatgggattttccttaaacgtaatctcactgacatccctggtacttggtgtaggtatgatggtagataactccatcaacgtattggatggctgtttccgtgcaaaagaacatagaaacttttttgatgcggctattgaaggaagccgtattatgatcacttccattgtaggtggtacagccactacctgcgttgtatttatcccgctggcaatgctttccggtctgtccggtcaaatgtttaagcagttaggtttcacgatcgtattcagtttgatcgcgtccttattctctgcggtcaccatcgtaccgctgtgttattatcagtggcatccggtagaaaaggaaaatgcacctgttgccggttttatacgtaaatgccaggaaatttaccgtaatatcatgcctggtattatcccgaagacaaagacagttatcagtgccagtattttactgcttgtattttccttcttcttagcttccagactggatgtaaagctgatggtttctacagatgaaggtattgtagatgtaactgttaaaacaaaaccgggtctttctgttgctgctgttaatgacacagtgtcccagattgaaaatatggtggcaaatgacgaagaagtcgatcattatctgctgacatacggttccagtggtttaagtaccatgggcggcagcagcgttaccttaagtgcttacttaaaggatgaccgtaaaatgtccacagatgaagtcatcgacaaatggacccgtgaaacagaaaattacaaagatatttctgtaacaatggaacagggaagtaccacttcttcctccatgagcagtaccaatcagatcgaagttgacttacagagtaccgattacgatgctttaaagaaagcttctgatgaactggtagaagaactgcgtaagagagaagatgtaatgcaggtacattcttctattgaaaatgcggcacctgttatcaaggtaaatgtagatcctgttttagcacaggcagaaggtcttacacctgcgtccatcggatctctgatctacagcaatttaagtggtatcaaggcaaccacagtccgtgtaaacggtgaagatacagatgtaagagtagaatttgatgcagataaatatgacagcattgacaaactgcagggaatgatgatcaccacagctacaggaacaacccttcctctggaagatctggcgacgatccactacgaagacagtccgcagcagatccagcgtaagaataagcagtaccaggtatctattacgatggagccacagtctgagtataagaaaacagctgaaaaagatgtgaaggaatttgtgcgtaactggaatatgccaaatgaggtagaaatggcgccaaatgccatggatgagagcatgggaagcgagatcggtgctttaggaggcgctcttataaccggcgttttcctggtatttgttgtaatggctatccagtttgagtcacctaagttctcactgatgatcatgacgaccattccattctcactgataggatcctttggacttctgttcctggcagacagtcccatcagtatggtatctatgttaggtttcctgatgttagttggtacggtagtaaacaatggtattttgtatgtagatacggtaaaccagttccttgcagaaatgcctctggataaggcgctggtagaagctggtgctatccgtatgagacctattttgatgacaacaggaacaaccgtgatctccatgcttcctaacgcagttgcttacggtaaatccggtgccatgatgcagggccttgcactggtagatgtaggtggtctgatcgcagcaacgatcctgacactgatccttcttccaacttattacagactggtccacaatatgggacgtaaggcagttggggaagatgtgcctatggtttctgattaaaaattaagataagtaagataataagagagcaggacttttgtggttttgctctcttttggcgttgttacagttcagccatgacatggcgttatgctttttgtataaacctgattgacgttttgcctgaaaaattgtataattgataaagaatttggaaattttcagacgggagaatacagatgatcgcattaaaggccgaagatgtaaagtcctttactaccaagctgtttgtacgggaggattttgatgcatttctggtaaaggaagtaaacattaccacctacaacagtttttccattgacggacatgtaaaacagggctattacacagaggaggaacgggaagaaaaccatatagaagagttttcatcctggaagaccttaaggcctttttgtttttcactgatcaagggaaaaaagcttcccggaagttttcgtatcgtgctgcagctgccaaaggcaggcacagagaagtttgcagccagaacaggtgccgggatcgaaggaagccagatccagggactgtatctgaacatacgttacgatgacgggaaaatgtactgtatcaccggaacatcattaaactttttcaccatggacaaaactctggatcttgagtgggataaggcagttaaacagtttttacagtcccatgagattccatgtacagaggcaactgaaggataagagcaggaagaagattgtctgtaaaaggataaaaattctgaaagcgtacaaatgtcctcttggagtctttcgtgtacctgccttttcaggcacagaaagaccctgagagaacataagcagcaatggaggaaatggcatggataaaaacaatttttcgcagaaactggctgaactgacagcgctggcagcagccagtgaaaacaaactccagatgacacaggttctggatgcttttgcaaaggaacaggtaacaccggaggaaatggaagctgtttatgccaagctggagaagaaagggatccagatactgacagaggaggaagagggggcaaccgatgacagccttcttttagatgatgcagatgataatgatgagtctgtttccagtatcattggagataaatacagatggagccacaacgattccttagatgacggggataacgatgattttaccccttcttctgcagaagaggaagaagagacaactgctacctcggaacagctgttagaaggcgttgcaagtacggatcccatccgtgaatatttaaaggagatcggttccattccgctgctgactcaggagcaggaacaggacctggcaaagcgtaaatccgagggagatgcagaagcaggaaagaagttagtagaagcaaaccttcgtctggtagtcagcattgcaaagcgctataccggtcgtggtatgagttttctggatctggtccaggagggaaatatcggtcttatgaaggctgtagagaagtttgattatacaaagggataccgtctcagtacctatgccacatggtgggtaaaacagtctgttacaagagctttggcagaccagtcccgtaccatccgcctgccggtccatatggtagaagcggtaaaccgcatcagaaaagcccagagagctttagctgtaaagcttggaagagagccttccaatgaagaaatcggcaaagaagtgggaatgtctgaaaagcgggttacagagctgatgcagtcttccggtgatacggtatccttagagacaccggtaggagatgaagacggctcaaatttaggcgattttgtggcagatgattccaatgcttccacagaggaaaaagcagaaagcgtttttttaagagaagagatcgaacagatgctccaggggttgaatccaagggaaagggaagtgatcatcttgagatttggtcttgaaagcggccatcccctgacactggaagaagtaggaaagcgcttcaaagttaccagagagcgtatcaggcagattgagacagcagcgcttagaaagcttcgcaatccgtccagaagtaagaaaatcagggattttctgccgtgaaaaatttacagaaaggtcatatcaggtgactcacggatccacagttaatacttttttgcttgatccactgtacaataaggtacggtggatctttttatgtaaaaatggtaatgtgaacagcaggtgatgtacttttgctagcactcatttaaaatgagtgctaatttttgttgacttttagatataacggtactacaatatatcttgcggacaaaatccgtttttaagattttcaaagcacatattactagtacatcgtttcgtaaataactgtactaatcacgtaggatgcggatttgagtgtgcaggtctaaaaacgcaggcgtagcgggctacgctgaggcttttaggcctgtgcaatcagattcgcagacaagtgagtggtatagttattttgaaaacgatgtactagaaaagattaagaagatttataagaaagaggcgtatattatggcaaagaaaggcagtttatctataacaagtgaaaatattttccctgtaatcaaaaagtggctgtattccgaccatgacattttttacagagagctgatcagcaatggctgtgatgcgattactaaattaaagaagttagaactgatgggagagtacgagaaaccggaagaggttgagtacaagatccaggtcagtgtaaatcctacagataagaccatcactattgaagacaatggtcttggtatgacagaagaagagatcgacaaatacatcaaccagatcgcattctccggtgttcaggactttatggagaagtacaaagacaaggcaaatgaggatcagatcatcggtcacttcggtcttggtttctactctgcatttatggtagctgacaaggttgagatcaattccctgtcttaccagaaagatgcaaagccggtacactgggagtctgaaggcggcatcaactttgagatgaccgaaggcgacaaggcagaagttggtacttctattaagctgtatctgaacgaagaaagcactgaatttgcaaatgaatacagagcaagagaagtcatcgaaaaatactgcgcatttatgcctgtaaacattttcttaaagaatgagactgcagagccggaatatgagaccattgaaaaagatgagctgacagataaggatacagtagttgagactgtcatcgaacctgcaaagacagaagaaaaggaaaaagaggatggtaccaaggaaacagtagaagttgagccatccagagagaaatataagatcttaaagcgcccggttgcattaaacgataccaacccgctgtggaataagcatccaaatgagtgtacagacgagcagtacaaggacttctaccgcaaggtattcagggattacaaggaaccactgttctggatccatctgaacatggattatccgtttaacttaaagggtatcttatacttcccgaagatcaacatggaatacgacagcttagagggaactatcaagctgtacaacaaccaggtatttatcgctgataacattaaggaagttatccctgagttcctgatgctgttaaagggcgttattgattgtcctgatctgcctcttaacgtgtcacgtagcgcgctgcagaatgacggttttgtaaagaagatctctgattatattaccaagaaggtagcagacaagctgtccggtatgtgcaagactgaccgtgagaactatgagaaatactgggacgatattgctccatttatcaaatatggttatatcaaggacgagaagtttgctgagaagatgggcgactatatcctgtataagaacctggaaggcaagtatcttaccttaaatgactgcctggaagagaacaaggaaaaacatgaaaataccattttctatgtaaccaacgaaaaagagcagagccagtatatcaacatgtttaaggaagaaggcattgacgcagtgatcatgcctgccgctattgataatccatttatcagccatgtagagcagaagcatgaaggacttaagttcctgcgtattgatacagatttaaatgcttctttcaaggaagaagtaaaggaagatgacgaagcctttaagaagaccagcgaagagctgacagaggtatttaagaaggctttaaataacgataagctggatatcaaggttgagaagatgaagaacgcatctgttgcatctatgatcactgtatctgaggaaacaagacgtatgcaggatatgatgaagatgtacagcatgggcggtatggatatgagtgctttcggcgcaacaggcgagactcttgtattaaatgctaatcatccactggtaaaatatgttctggagcacaaagacggggaaaatacagccaagatctgcgaacagctgtatgatctggcaagcctggcacatggccagctgtcaccggagcgtatgaccgggtttgtaaaccgcagcaatgatattatgatgatcatggctggacagaaagcagaataaatagtacaataagaagcacgacacagagttgcgggggctgtttcacaggtattttgcctgggtcggcccctgcttttttgttagatgtactcgcaaaatcggatacaaaaagatcctgagagtacatgggttgaatatatttgaaagtacagggagaatatatatgaaaaaacgtaccttatcaagaaacgtgctgacactggctcttggaatgtcactggcggcagcaggtgcttttgcagcttttgcagatccgctgggcttaagctatattaatggtcagactgtaacaagccgtatgggcggctttgaatttagcgcaccggcagagtataaagtagacagaagtggcgcttcttcggctctttccggggagatcgtagcgggtcttgtggaagatagcggaaaaatcgattttgcggcgtccatggtagatgaaaccaataaaagttatatcatcaatacagccatggtcctgcctgcagatgatggttccggacagccttttagcgtagaaaccttaaaagcggagctggcagagtccggtctggatccggcagatacagaaagcggtacagtaaagctgggagctgcagattatgagtatctgaaggtaaattacggaaaaatgatggcagactccatgaggggacaactggagtcaggacagctttctgaaaaacagaaagagcaggcaaaggcattattagaccggatggaaaaactgctagtcaatgatttttatatccggaatacaggagacaagatctatgtgctctgccagacctattctgttgaccaggcagagcgtgcagcagcctttttaggtcttttaaagccttatacaggagtagaaggctggtaccagaacggggaaaactggcagtataaaaaggcagacggacagttggcgttaaactgctgggaacaggatgaaaatggccttacctatcatctggacggaaacggaaatattgagtacaatgcctgggtacaggaaaatggcggctggaagtatgcagatgaaagtggtcatatggttacttctgtaacaaagaccattaacggagtccagtatacctttgatgataagggaaatatgatcgccagaagtgagaaagcggccccggattattcccttggaaaactggaaggaaatacctatacgaattactgggcagatatgacactttccttcccggaggaagctactgttatgatcggaaatggcagtgcccagacctatgccctggttggaggcgaacatgtggatgtaaatgatcctgaattaagttaccgtattacagtggattttacagaggcagacatggagctggatcgtttcatggatgcagtagttggtcacgggggaacagatggctataaggtagatgcttcaggtaaagtgagcctggggggctatgaattccgctattgcaggacttcctacgattttggtgatggaaccgcccatcactctgactggtatgtacgccagattgattccaaactggtcctgatccattttgattactacgatgaactgaaaaaccaggtacaacaggtttatgacagtatcagacagccacaggcgtagtcagatagttgataaaaaacgtcaaagagtaaagaaggctctttgacgttttttcgaaattactaacgtatagtgaatgttaaaagttttttgatatatttgccgttacatggggcctaagtgaatcatttgagcgataaataccagggcacttcctactgccagccagagaagcatgattttccacataaagcgcatccaacgatcgtaaggaatatttgcaacacttaagttccccattaatgcggtagacataggaagaatgtaattgcagaatccatcgccaaagttaaatgccagaatagcagtttgacgggtaattccgaccatatctgcaacgggagtaaaaattggcataactacagcagcttgtccggagccggaagttaccaatatattgatgataaaattaacccagtacatacacatgccacgtagtgcaggaggaaatgcattaagtacaatggtacatccgtaaaccagagtatccagaatattggctgaagataaaacaccagatgtagctcttgcaagaccaaggattaaagcggatacagtgagtttttgacatcctgttgcaaagtgtttagcaatagtacttggaccaaaacctgcaaaagcacctgaaattacaccaagccagataaagacaacagatatttcaggaagatcccatcctcgtgttacacaaccccataccataacaacaagggaaccaattaaagttaaaagaaccagaagcttacgtggagtcagagaagagtcgtgagaggcatcaacatcttcatcatttctcagtttatccaattcgtacatagggcttgaagcaggattggatttgactttacgtgcgtaacggatcagggcaatactggtaaaaatccagaaaacgaagaagcagaagaaacggtattgaataccggagtaaagtggaagttctgcaattttctgggcaacaatggtagttgaggtatttaaagtacctgtggaaaaaccaatggcaccacctaaaagtggcagtgcagcaccagtaatggagtcaaatcccatagctcttgtcatcataatgataacaggagtaaatccaataaatacagttacagactgtgtagtagcaatggcagcgaaaaccaggagcagaagcgggatgaaaatagcttccttattgccaaattttgcaactacttttgcgattagtacctgaagtgcaccggtttcaaccagaacattaaaagcaccaccagacatgatgaccataaaaatcagtttggcactgctggaaaaaccgtctataatataattaggaattaaaagtggatttacaggggttttagcaataaatgaaaactgatcaggaacaactactttaattccctgagcattttcaacacgggcaaattctcccgccggtagaatccatgtgagtattgaggcaatgaatacgataccaatgatgatgacaaaggtatgaggcactttgaactttttcttaggtacgttttgtttttctgatagcataaaaattccccctttagtaaaaattaagaaaatgagaacagaaatgaaaagaaacagcttcctgttgcaggaaaatgttgagtgaagtataatcaataaacaaagaattgtaaagataaaatctgtttataacagaatgcttcccataatgtttgattatactgagaaaattttgcatatttggcagagaggaggaaaatggtctttgaatttaaaagaacaaatttatatgctttctttggaacgtcatagtaatattacaagagcggcaaaagaactgggaattagtcaaccggcattaactacattcttaaatcatttggaaaaggatttggatgtaaagttatttgaccgctctgcagttcctatgaaattaactcctgctggggagctttatattaataaggctaaaaagatgctctgcataaaagaagaatttgatagagaacttcaggtgttgaaaaaacgggatttatcatgtattagagtaggaatccagcagatcagagctcctcatgttgtgccgccattgactatggcagttaaacaggaatttcctaaattggatgttgtttttaacgaaaatcatggtgaaaatttgtttaatatgctggaaaggggagaaattgatcttttacttcataatcatatgaggcagataccgggaataagtgcggaatttttgatgaaggaccggttgctgtttatcactccaaagaatcatttgctaaacgcatatggaattaaatctgccaagccatatccttggatcgatttatcttggtttaaaaatgaaaattttatgttgctgccggaagcatatacattgagggaacatgcagaacaactttttgcctctttaggatggagaccagaaacaatagagatatataccagaacagagactattttacgcctggtcactgcaggcgcaggggttggctttatttttgaaagctatctatcatattttaacgaagaacgcaaacctgcttgttttcttataggaaatcctccgattacggtggattatatggctttttatccggaaaaaatgaaacaatatccggttttcacccgttttttggacatgatccgctttgtattatcaaagtaatgttggtatagatggtgagtggcaataattgaagataaaaaagattgacaaaaaagaaaatatgtgagaagctttagataaatgagacagtgaaatgaatagaatgtgaaaaggagaattgcataatattctcttttttgtagtgcagccagtcctgaataaggtctggctttttttgaatggattacatggttttgagaagacatgttattaaaaaaggaggatttataatggaacataagtctttttcagatcgcttaagggagtatttaaaagaaaatgaaagtaaacttatagaaggattatcagagattgtagctcagcctagtgtaagcagtactggtgaaggagtatctaaatgctgtgaactaatagtgaaaaagatgaaagcaattggtatggatgtacagacttatccaatcgagccacattcagtgattattggaaaaattggagcagatccttcaaaaaagacagttttgatatatgctcattatgatgtacaacctcagggtgaccttactcagtggagaacaccgccatttgagccaacaattatagaaggggtaatgtacggacgtggaacagcagacaataagggaccattaatggctcatttaaatgcaattgaattttggttgaaagaatatggggaattgcctgttaatataaaaaccatttttgagggttcagaagaaagtaatagtgaaggattgccagaatttctttgctcacataaagaattattaaaagctgatatggtatattttagcgatggatctaaaaaccataatgaccagccgattattgctcttggtgtaaagggaatgctatatgtagaattagtgttgacaactatgaccagaaatgtgcattcccaatatgcacctgttttgccaagtgcagcatggcaaatggttcagctattaaataaattaaagacagaggatggtactgtccatatcccaggcttttatgatgatgttgtacagccgacagaaattgaaaaagctatatacgataaactgccggacgtgagagaaaatctatttagaagttatggagcttatccgatctatccggcagataagggttactatatacaattaaatggaaccccaagttttaatatatcaggaatcagttctggatatacaggaaacggaacagcaactgttcttacatcaaaggcaattgcaaaaattgatatgcgtcttgtagctgcccaggatggcaataaaatattggataatctgaaacaatacattaaaaaattaggatatgacaacgtagaagtcatttgtcatggaattacagagcctgcaaaaacaccggttgatactccgtatctgcttccagtggagaaagcaacccggaatgtatttggtccgtacatggtatatcctaatcggccatcaacagcaccggattatttgtggactaatattctgggtttgcctacgatccaggtgcgctggtgtgatgcaacttcagataatcatgcgccaaatgaacatttaactttatccaattatatcaaagggactgagcttacagccacagttttaaaagaaatcagtgaaatgtagaagaggatggacatgaaagacaaaaaacttttatcagatatcaaggaatatctaaaatgttatgagaatcaggttttggaagattggtatgaactgatccgtcatataagtgttagtgaaacaggggaaggaattgaaacgtgctgtgactggatccagaaaaaaatggaagaaattggaattcaagtaacaaagtattctgtaaaacccgctccagtcctggtagggcggtttggcaatgatccggaaaaaaagacagttctgatctatgcccattacgatgtgaaaccggctggagaacgaaaattgtggcattcagatccgtttgttcctacagtacgtgatggaaaagtttatgcaagaggaagtgctgataataaatcacctttaatggctcatttaaaagctttggaatactttatcagaagaaaaatggaagttcccgtaaatgttatttttgtatttgaaggggatgaggaatgcggcagtagaggattggaggaatttctggcagagcacaggacggaattggcagcagatctggtgtttttcagcgatggtccaaaggatcctagtggacttcctatcattgctctgggggcaaagggagatttgtctattcatattacagttgaaacgatgaataggaatgttcatgcccgttatgctccggtactgccatcagctgcgtggcagttggtggagatattgggaaagtgcagatcaaaagataagattctgatacctggttttgaggaaggaatattaccttttacaaaaaaagaaattgagatcatggataaactgccgaagtcagaggacagtttgaatacaatctatgaggcaaagtcgtctaattatggcaaggacttttatccgagacttttaggacagcctacatttaatatttgctggattaaaacaggagctaatggagtagttcctgcaaaagcggaagcattgatcgattgccgtttagtaccagatcaggatcctgagaaggtatttcaatgtatcaagaggcatgttgagatgatggggtatgataatgtgaaaattgaaaatgatggttatatcccttcttcaaaaacagatgtgaatacgccgtatttgccggctgttgaagaaatttgtcgtgatatttatggtgaatatgtgatctacccatgcagaccatcatcagcccccgattatttgtggactaatgttttaaagcttccggctattcaggtgcgatggagtgatgctgattcagataatcatgcgccaaatgaacatttatccattaaagagtatatggatggaattgcgctgacagtgtgtgcgttgcaggcagtttctgaaatttcagaaattaacgaaaaggactgaagaaaatccgaataaaaactcttgacatcaccacgtcacagtgctatactccaaacaacttcattagaaaaccgttgaaacggagataacggcagttatggcctcacagagagtcggcgttggtggaagtccgatagatcccagattgtcaaatggaccgttgagggcgcagtcaaagaaggtgacttcgagtattctgcgacgtggggctgacgttaacagccggtagtatgattgtactacgcagagcgcacagcttatgtgaaacagaggtggcaccgcggtttattccgtccctgatgatatttgtatcatcagggacttttttgcgtgagcagccggtcaaagtccgtgtttgcacgaaacattgacaactgccccgtcagatgaaggaaaagaaggaaaaaacacaggtaaatgtacaacagacacagataagtgtacaaatggtacatgaaaggcaagaggaggaaaaaaatatgtcaaatgcaaaaggacgtttcggaatccatggtggccagtatattccggaaacactgatgaacgcagtgatcgaactggaagaggcttacaatcattacaaagatgatcctcagtttcaggcggagctgactgaattgttaaatgagtatgcaggtcgtccaagccgtctgtattatgcagaaaagatgaccaaagacctgggcggagccaagatctacttaaagagagaggacttaaaccacactggcgctcacaagatcaacaatgttttaggacaggcgctgttagccaagaaaatgggcaagacccgcctcatcgctgagaccggcgcaggccagcacggtgttgcaaccgctacagcagcagctcttatgggaatggaatgtgtggtttatatgggtaaggaagacaccgagcgtcaggctttaaacgtataccgtatgagactgctaggagcaaccgttatccctgtaactacaggtaccggaaccttaaaggatgcctgctctgcatgcttcagagagtggaccaaccgcatcagcgatacccattactgccttggttctgttatgggaccacatccgttcccgactatcgtaagagacttccaggcagttatctccaaggagatcaaggaacagctgatggaaaaagaaggaaagcttccggatgcagtgcttgcctgcgtaggcggcggttccaatgctattggcgcattttataactttatcaacgatccgtctgttaagctgatcggttgcgaggcagcaggacggggagcggatacaccggaaacagcagcgaccattgctaccggccgtctgggaattttccatggcatgaaatcttatttctgccaggatgaatacggacagattgctcctgtatattctatttccgcaggacttgattatccgggcatcggaccggaacatgctatgttacatgataccggccgtgcaacctatgtacctgtaaccgatgatgaagcagtagatgcttttgaatacctgtcaagaaccgaaggcatcattcctgccattgagtctgcccatgcagttgcctatgcaaagaagctggcgccgactatgggaaaagaccagatcatcgttatcaacatttccggaagaggagacaaagactgcgcagcgatcgcacgctacagaggggagaatatttatgactaagataagagatgcatttaaagatggcaaggcatttattccgtttttaacctgtggagacccggatctggagactactgaaaaactggtatgcgctatggcagaggcaggtgcagacctgatcgaactggggatcccgttttctgatccgacagcagaaggacctgtgatccaggaagcaaatgtaagagcactgtctgcaggaactaccacagataagatctttgatatggttgtccgtatcagaaagacagtaaagatctcgcttgtgtttatgacctatgcaaatgtagtattttcctatggctctgagcgttttatctccaaggctgcagagatcggcatcaacggtctgatccttccggatgtgccatatgaggaaaaagaagaatttgaaccgatctgcaagaaatatggtctggacctgatctccatgatcgcaccaacttctgaccacagaattgcaatggtagcaaaagaagcgacaggatttatctatgtagtatcttccttaggtgttaccggtgtaagaagcgagatcaagacagatatcggtgctttagtagagcagatccgtgcggtcaccgatgttccgtgcgcagtaggttttggtatctctgagccggagcaggcaaagaagatggctgggctgtcagacggagccattgtaggaagtgccgttgtaaaacggatcgcaaaatatggaaaagactgcgttccttatgtagcggaatatgtaaaggaaatgaaacaggctgtaagggaagcataaggcgccccaaaggctgctgcagagggagaaatccttttgcagcagcctttttttgtgccaagtactgtgatctgtcactgaactatagacaaatggttataactgttatagatatgatagataagaaacaatcattgatcggtacatctcgcagatcgttttacagattatttattacaatcatcttttagatcatttccagaaatgtactgactacccgtggcatatagcggccccgtttataataaaaattcacttcccggagagcatctttatgatccagcttgtagtataccaggccttcatcgtcaggaacatggcgcaccagggtatcagaacagaaagagatccccattccataccgggacagattgtaggcagtgatctgctggtccagctccagttttattttggggagaacatgggcattatggcagatgcggtctgcccgggagcgggtatcatttccggattttaaaagtaaaaacgattcattttgaaaattttccaggggaaccggcgggatccgggagtttagatgccggttttctcttatatcggaagctgtaagggcataatttttcattttttcatttacagccaggcggatgggcacagccaacagcaggtgttcttcacagaagaaacttttctggtaaacagccggatccatgtttttattgtcaatgagcagatctaaggagccggagaaaaggcggtctgtcagctgggaagtggtagcttccaccagatcgacctggacctggggatattgttctgtaaagcgggataaaagaggcgggagcacataagaggcaaacagattagtgccgccaatggcaatggtaccgctttttaattctttcatatcattaatataattctgaaatccagtttccacatccatgatgatctcaatggaacgtatgtattcttttcctagttctgtcagctggatatgattggaactgcggtcaaaaataggaaagccgatctgtttttctgcttttttaactgcagcacttaaggaaggctggctgataaaaagatttcgtgcagctttggaaaaactcatttctttgtaaacttcataaacatagtgcattccctggaacatgggagtcctccttgtccttggtattcatacagataatgtattatagacatttatctataagaagtatgaaattataagtatttgaaaatattgtagcctggatctatagtagagtcaagaggatgattgcgtacaaaagaacgaaaaaacggtcactgatgtacgtatgataaatgtggaggaaagacatgagcgagatcatgaataatggaatgaatgaaataggaagtaatggaataaaaggtaatggaacagaagagaagaaataccgcatagagcacgactctattggagaaaaggaagtacctattgatgcttattatggggtacagactctgcgtgcccatgaaaatttctatattacaggcttaaaaatgcatccggagctgatcaaaagtgtagcccagatcaaaaaggcagcagctattaccaattttgaggtaggagagctggataaaaagcgtgcttctgctattacacaggcctgcgatgagatcatagcagggaagcttcacgaccagtttattgttgacccgatccagggcggtgcaggaacttccctgaatatgaacgccaatgaggtgatcgcaaaccgtgccattgagatcttagggggcaaaaagggcgattacagcctggtaaatccaaatgaccatgtaaacttcggccagtctaccaacgatgtattcccgtcctgtggcaagatggcagccttaaagctgatctctaatgcccaggagcagttaaaacgtctggaaaaggcattaatggataagtcaaaggaatttgacgctgttattaaaatgggaaggacccagcttcaggatgcagtgcccatccgtttaggacaggaatttcatgcctatgcatctgcgatccgccgcgatatcaagcgttttgacaatgcaaaagaagagatccgctgcttgaacttaggcggaactgctattggaaccggcttgaacgcagatgtacagtatttccacagagtagttaaaaacatgtccacattgacaggagaagaactggtgcagtcctatgacatgattgatgcaacccagaacctggacagctatgcttctgtatccggtatcgtgaaaaactgtgcagtgaacctttccaagatgtgtaatgacctgcgtcttatgtcatccggcccaaggaccggctttggagagatcaatttgcctgcaagacagaacggctcttccattatgccaggaaagatcaacccggtcatcccggaggttgtaaaccaggttgcatttaatattataggaaatgatatgactattaccatggcagcggaagcaggacagctggaattaaatgcctttgagccgatcattttctataacctgtttgagtctcttgaaacactggcatcagccgttaatacactggtagataactgtattgtaggaattaccgcaaatgaagaacactgccgtaagcaggtggagaacagtatcggtgttattactgcgatctgtccttatgtagggtatgagacagctgccaatattgcaaaagaagcgctgcgcaccggcagacaggtccgtgatctgatcctggaaaagggactgatggatgaaaaacagttaaatacagtattaaatccatacaccatgacagagccgggtatccttggaaaggaccctatggaccagcttcgttagatgatcagaataaaattgggacaaaaatacaaaaaaatacaaaaaaattaaaaaagtgcttgactagaactggtattatatgtataataatcttcgcagtcgcgattgagactgcgaagacaaaataatgggctatcgccaaatggtaaggcaacggactctgactccgtcattgtgaaggttcgaatccttctagcccagctaaagcgcaaa

SEQ ID NO: 3633 - DNA, 9917 bp, Unknown
  gut microbiota DNA sequence
aaaacttcatattataatgggctatcgccaaatggtaaggcaacggactctgactccgtcattgtgaaggttcgaatccttctagcccagtttgagagagtctttgatttctgagctttggaaatgaaagacttttttgttgcacctgtaaccgccccgtgttatacttggggagaaaagcggttatctatgataacacatttataataagaagaaacactaaaaagaaacagaggaaatgcatgtatacatttgacagcaggatccgttacagtgagacagatgagaccggtgcgttaagtttgctgggagttatcaattatatgcaggactgcagcacgtttcagtcagaggatattggcctgggagtagaatatctggaaaaaaagaagagggcgtggctgttgtcttcctggaggatcgttattgacagatatccggtcctgggagaaaggataaaaataggaacctgggctacttcttctaaaggaatttacggttaccgtgattttgtacttatggaccaggaaggaaattacctggtaaaggcagagtccgtctggtttttctgtgacacggaaaagatgatcccggtgcgtgtaatgccggaagatgtagaagcctacggagaagggaaagcgctggatctgggaaaggcaccaagaaagatcgctgttccggaaaattatgaagaggaaacaccggttactattgcagtccatcatttagataccaaccaccatgtaaataatgcccagtacgtagatattgcaagggaagcagtaacctgtacgaaaaaggtaaaagagatccgggtggattataaaaaggcagctgttttaggggaagtccttataccaagagtgacgaaaacaggggaagatgagaggaccattgtgttggccggagaagataaagagatccgtgcggtggtctggcttaagtacgaagaagcataaaaggagtataaatatatgatagaattaggaaagacacaggaattagagatcgtgcgcaccaaagaatttggcgtgtacttaagtgagaaagcaggagatgaagcagcagtccttcttcctaaaaagcaggttcctgcaggagcaaagatcggagataaggtgactgtatttatttacaaggactcttccgaccgtctgatcgcaaccacaggtactccaaagctggaattaggccagtgtgcagtcctggaagtaaaggatgtggcaaagatcggtgcattccttgacatgggtctggaaaaagacctgctccttccatttaaagagcagacccatccggtacgcaagggagaaaaatgtctggtatgtctctatgcagacaagagccacagactggctgcaaccatgaaggtctactctcatatgagtaatcagtctccgtacaaggcagaagactgggtagaaggtactatttatgagattaatgaaaatattggtgctttcgttgcagttgataataaatattatggtttgatccctaaaaaagagatgtatggaaagtaccgcgaaggagatactgttaaggcaagagtcatgagagtccgcgaagacggaaagttagacctttgtgtaagagaacgttcctatgtacagatgggttctgacgcagaactggtattaaaggtgatcgatgaatttgacggagttcttccttttaatgataaggcaagaccggagaccattttaagagaattccatatgagcaagaacgcatttaagagagccgttggacatctcttaaaagaaggcaagatacggattacggaaaagaccatagaaagggtataagaagtactcttaaaatattgcaggagaatatccgcagatataaatatgggtagcagaaagacagttgtgtttagcagctgtcttttgtttttagataaggaggaaacataaaaatgcagaaaatatggaaagattacggtgccatcaccatagggaccatcctcattggtctggccaccaaaaatatttttgatcccgccagcatggtaacaggaggcgtttccggtattgccattattggtaaggaactttggaacctgcctttatgggtcaccaatacggttttaaatatcccgctgtttttggcaggttttaagatcatgggatggaaatttattaaacgtacattgtatgcaacagtgttactgtccgttgccttttatatcctgccggaaggtatgtatatagaagatgatctgctgctgtcggctctttttggcggtatcatcacaggcgttggtacaggtcttgtactggccggaggctgcactacagggggaacagatatgctggccgctctgatccgggcaaaattcccccattattccgttgcgcagatcatgcaggtattagacgggctggtagtagtagccggtgcaaccgtatttgggatccgcgctgccctttatgcactgatcgctattttctgtatgggaaaagttgcagatggtcttattgaaggaatgaaattttccaagcaggtttatattatttcagataaatataaagaaatttcagatgccatcatgacccgtatgggaagaggcgttacaggtcttgcggcaaaaggaatgtattcagatgagacgaaaaatatgcttttttgtgtagtttccagaaaagagatcgtggagatcaaagaaattgtatcagaatacgatccgaaagcattttttatcgtcagtgacgcccgtgaagtttttggtgagggatttattgaagataaaaaccaattaacataataaccaaagtttttgaggcaaacgaaggaaaactttgacagatacagcacttttttaattgaatatacattttagctaaattccaaatttagattttgtggatttacagtatggaataaaaatacgctttcctgtatgatagagacagttgcaaaagacctatatgaacttcctaaaaagcctgtaaaagggcaggaagtacatctataaatcaggaggaaaatagaatggcaagtttatcactgaagaatgtaaccaagaaatatcctaacggatttgtggctgttaaggacttcaatctggagatcgctgacaaggaattcatcatcttcgtaggcccttcaggatgcggaaagtcaaccactcttcgtatgatcgcaggtctggaagatatttcatccggtgaactgtatatcgatggaaaactggtaaatgacgtagagccaaaagacagagatattgcaatggtattccagaactacgctctgtatccacatatgtccgtatatgacaacatggcattcggcctgaagttaagaaagacaccaaaggatgagatcgataagaaagtacatgacgcagctaagatcctggatctggagcatctgttagaccgtaagccaaaggctttatccggtggtcagagacagcgagttgccatgggacgtgccattgtccgcagccctaaagtattcctgatggatgagcctctgtcaaacctggatgcaaagttaagaggccagatgcgtgttgagatctccaaattacatcagagactggaaacaaccatcatctacgttacacatgaccagaccgaggctatgacactgggtaccaggatcgttgttatgaaggatggtgttgtacagcaggtagacagcccacagaacttatatgacaagccatgcaacaagttcgttgcaggatttatcggcgcacctcagatgaacatgatcgatgcccaggtagctaagaacggttctgatgtaactttagcattcggcggacatacattaactctgccagaagcaaagggcaaagcactggaagcagctggttatgtaggcaaggtagttacccttggtatccgtccagaagatctgcatgacgaagaagcattcctggcagctaatccaaagagtaccttccaggtagagatccgtgtatacgaaatgttaggttctgaagttcttctgtactttgatattgacgaagctaacttcactgcaaaggttaacccacgtaccactgcaagacctggcgataccgtaaaactggctatggatctggataaggttcacatctttgataaagaaacagaatgcgttatcattaactaattattagctaatattcagaggaaatagtgaaaatcctctgtagaaaacgacagtaaaaaaaggcaggagagtttacaactctcttgctttttttgttattttgcattaaaatatgaaaatagggaaaacagtaactccaccatgatttatcatggcaatgttcataaattttcaataaggcgaaaaggagagagttgaatgatctcaaatcagatacttcagactacattagatggattaaaagcaatcacaagaattgacttaggtatatgtgacaccgagggaaaggtacttgcttctacttttacagatgcggaagaatctgaaagctccgttctggcttttgtagactcaccggcagacagtcaggtgatccagggctatcagtttttcaaggtgtttgacgagcatcagttagagtacatcttactggcaagaggagcaagtgatgatgtatatatggtaggaaagttagccgctttccagatccagaacctgttagttgcatataaggagcgttttgataaggacaactttatcaagaacctgcttcttgacaacctgctgttagtagacatttacaaccgtgcaaagaagctgcacattgatacagatgtaaagcgtgttgtatatattatcgagactcacaatgaaaaagatgtaaatgcattagagactgtacgcagcctgtttgcctctaagacaaaagactttatcacagctgtagatgagaagaacatcatccttgtaaaagaagtacgccagggcgagtcatatgcagaattagataagactgcaaacatgatcttagacatgttaaatacagaagctatgaccaaggtacgtgtagcttacggtactgtgatcaatgatatcaaggaagtttcccgttcttacaaagaggcgaagatggctctggatgtaggcaagattttctacgcaagcaagaatgtgatcgcatacagcaacttaggtatcggacgtctgatctatcagctgccgatccctctgtgcaagatgttcatccgagaagtatttgatggcaagtcaccggacgagttcgacgaggagaccttaactaccatcaataagttctttgagaacagcttaaatgtatccgaaacttccagacagctgtatatccacagaaataccctggtttaccgtctggacaagctgcagaagagtaccggtcttgaccttcgtgtctttgaggatgctatcaccttcaagatcgctcttatggttgccaagtacatgaagtacatggaaagcctggactactaatttccggtggttctggcacgtaagaggtaagttagaaaatgatagaaataagtcatgtaagtaaatcttacggaagcggcagcaaggccatccgtgacctgtctttaaccattgatgacggggaatttgtgtttatcacaggccgcagcggttccggaaagagtacattgatcaagctcctgatgaaggagcttgatcctactaaggggcgtattgtagtcaatgatatggatcttgggaagatgccccgcagatatgttcccaaatacagaagaaagttaggggtagtttttcaggatttccgccttttaaaggaccggacggtatttgaaaatgtggcttttgcccagagagtgatcggtgttccatccaggaccatccgcgagacggttccccagatgctgcgcctggtaggtctttcttctaaatataaggcatacccgggtcagttgtccggcggcgaacagcagagagtggctattgcaagggcattgatcaacaagccggaagttttactggcggatgagccaacaggaaacctggacagcttcaatacccatgagatcatgaaccttttggatgagatcaaccagaggggaacaacggtgatcgtagtaacccacagtcaggagatggttgcggagatgaacaaacgggtcatcaccatggaccgcggggaagtcatccgggatgagggcggaaccaggagatagaaacggcctggaaccgccggaaaggcataagaagtaaatgagtacatttttatattgcctgaaacagggcgttattaatatatgcaggaatatatggttttccctggcgtctgtggcaaccatttctgcatgtatttttttattttgtctgttttttgccatggtggccaatgtacagcacggagccagggctgcggaagagacagtagggatctctgtgttttttgatgaaggaatggatgaagaacagatcaggtccattggatcacagatacaaagctggagcgaagtgcgggaagcaaggtatatatccgcagaggaagcatgggagtcctttaaaagtgaatattttgagggaatggaagagctggcagaaggttttgaggcagataatcctctggcaaattcctcctcttatgagatctatttaaaagatatttctaatcaggatatgatcgtaaagcggttagaaggtatggaaggcgtgcgaaaagtccgctattccagcgctttggtggcaggctttacaagcgcaggaaagatgatcggcgctttatctgctgtgatcattggtgtgctgttagcagttgctattttcctgatcagcaataccatatctgtggcagctgccttcagacggagggaaaatgagatcatgcgctatataggcgctacgaattttatgatccgggcaccttttattgtagaaggcctgcttttagggctctttggagcagtgatccctctggctggaatgaccattctttataaaagaggactggtgtatctgaataccaattaccagatgatcacaggactttttgaactgctgcctttaaaacagatctttcctgtaatggcaggtgcagctatggctttgggcgttgggatcggagctattgtaagctttctgaccatacagagacatctgcgtgtgtagagaggaaggaacagatgaagaaccgaaaaaacaaatttctggctcttggactgggggtcgttcttggccttagctgtgtattttcttcttatgctaccagtgcggatctgaaggatgcaaagaagaaagtttcatctcttcaggaggaaaaaaagaaggtccaggataccttaaaacagttagaagggctgaaatcagatgcagctgcttatgtaaaggaactggataagaagttgacttccttagactccgaactgagccagttagagaaagatatttccgcaaaggaagatcagatcgagaatacaaaagcggagttagaagaggcaaaagcagtggaaaaggagcagtatgcttctatgaaactgcgtatccagtatatgtatgaaaatggaaatgtcagctttgcggacagcattatgacctctaaaaacgcttcccagctgttaaaccgtgcagagtatgccagccagatcgctacttatgacaggaaaatgttaaaggaatatcaggctaccagggaaaagataaatcagaaagagcaggatctggaaacagaacattccaatctgttagcacttcaggagtctacggaagcaaaacaggcttctgtaaaggagctgatgagttccaagcagaaggaactgacctcttacaacagccagatcggtgcggctcagagtagtattgaccagtataatgcggatatcaaagcccaggaaaaccagatgaaggccattgaggcagagatgaagcgaaaggaagaagaggccagaaagaaagcggaggcccagaaaaagacgtataacgtaactaatcttgggaatattagctttaaatggccatgtccttccagcggacgtatcacctccggttttggcggaagaaagtcgcctaccaagggcgcgtccagcaatcaccagggtattgatatttcggccagtacaggagcttccattgtggcagctgccgatggtacggtagtgatcgctacatacagttattcagcgggaaattatattatgatcgaccatggcggcggcgtcagcaccgtttacatgcactgctcccagcttcttgcaagtcagggacagaaggtgaaaaagggacagaccattgcaagagtgggctctacaggatattctaccggttctcatttacattttggagtccgttccggcggaagttatgtaaatccaagtaaatatgtaagcccataggaaagggacagtcctttgaagggcattttgcaggaaaaaacagcataggctgtgaataagaaaaaggcacaggcagataggagagcggagcagtggaagaacaggacagagaagagatctcagacagcatagataaaaagaaagggcgaaaaggcggccgcttctgggcgggggtccttgtaggtgccctgatcatggcattggccgttcttttggtagtaggtgtatctgccggtatttatattacaggcagaaaagtgatccgtacagagcagtcttccggtacaggaaatggtgctccgggtatcacggacggcgaaaaggcaagcaaacctgatctgaaaaaggtatcctcaaaaatgcagatgatacagagcattatcgaccaggtatttttatacgatgaggatgccacagaggtggaagagtatatttacagaggaatgatggcaggtttaaatgacccatattccgtgtattatacagcagaggactataaagcgatccaggaaagcacagacggaagctattccgggatcggagctatgatcagccagaataaaacgacggggctgtgtacggttgtaaaggtatttgaaggttcaccggctctggaggctggtatgaaacccggggatatcatatacaaagtaggggatactctggtagcaggggaaagcctggatgtactggtaagtaattatatcaagggtaaggaaggcacagatgtacagatcaccgtatacagggcagagtctgatacctatgaggatatgaccattaccagacgtaagatcgaagttcctactgtagagtcaaagatgcttgcggacaatacaggttatgtggcagtaagtgaatttgacgctgttacagtggagcagtttgaaaaagccattgatgaactggaaaaccagggaatgaagcaaatgatcattgatcttcgcagcaatccaggtggtatgttagacagcgctgttgccatggtagattacattttaccagatgacaggaaagactttgaaaagggcgaaggaaagaccctgatcgtgtatacagcagataaaaatggaaagggagacacctacacagctgctgacggacacgaagtagatgttcctattgcgatcctggtcaatgagaactctgccagcgcttctgaggtatttacaggggctttaaaggattacaagaaagctgtagttgtgggaaccaccagctatggcaagggcattgtgcagaacctgatccccttaggtgacggatccgccattaagatcaccacggctcattactatacaccaagcggttttgaccttcatggaaagggaattaccccggatgtggaagtagagttagatgaaaacttaaagagtcagtccgtagttacacctgaggaagataaccaggtgcaggcggcaatggaagcactgaaagaaaattaaagagtatgtgaaaaagctgaggcagcatagcagtcagatgttatgcagaccttggcttttttgtagataaaacctatggaaatcgtatataaatagtaagtaaacaggcataaatcaggtagcttttctgtcgtgtatttgctataatcaggtgtgtagatagtgtactatatgcacaagtattgacgttgggtgggggggg

SEQ ID NO: 3634 - DNA, 6755 bp, Unknown
  gut microbiota DNA sequence
tattttttggctacgtacagtcttctgtaaggaaaaattccaggcagaccatgatgaacaatgtttcacgccagagtcagcatttacggacgatcttaagcattcattaccagtatctgaatgagatcgcggaagagatggcaaaggaagaagaactgttttctcagatcaatctggatactctggttacgatccacaataaaacagatctggaccgggtggcactgatcgaaacagatggtacggctcattatgataccggggatgtgaaaaatgtatcccaccgcagatattttaatgaggctgtaaacgggcagcagaccttaagtgacccaatagagagcagtgttgataaagaagtaagagtggtcctgggagtcccggtattaaaggatggggagattgccggtattttaggcggttcttataatgttacggctttaagtcacatgatgtttgatgacctgtttgggggaaatggctacagcctgatcacagataaagatggaaacgtgatcacttatgacagagtgtattcagagcaggaacaggaggtattttccggcaatatatttgattattttgataattgtcagatcaggacagctgcaatccaggacattaagacagattttgcggctggagaagagggaattcgtgaattccgcttttctgccgggagaaagcccttttattatattgcctatacccctcttgggatgaatgactggatgatcagttatattgttcctgtgagggcagcggaagcttcctatgactttatcagggattatgagatcatttttatcattgtctttggaatgttgatagcatccatggtcctttttattgtttataaaaaccggcaggaaaaggcgagactgttaaaacgggcacagagagatgcactgacagggctttacaataaaaaaacaacgcaggagctgatcgaaaggtcattagaagaaggggaggcagaaagctgtaacggccttctcattatggatgtggactattttaaacaggtcaatgacacctatggccatattgtaggtgataaggtattaaagacattcggacatcttcttgcaagacagttcagggagcacgatattgcagggcgtattggcggtgatgaatttatggtcctgatccggaatataaataatggaagtattgcggaaaacagggtgaaaaagctgatcgacgaggtgagaagccttgagataccggagatggatggaaatggcattaccatcagcgttggtctggcattttcaccggaacacggaacaacgtttatggaactgtaccgtcatgcagatactgcattgtatcaggtgaagcagggcggcaaaaacgggttcagtgtgtatgaaaaggcaaattaaaagttgacaaaattttttaaatagacatattgacttacaaaaaaagctatgctataatccaaccaatttaatacttcaaaccgatgaagcggagataacggctatgatgccttcacagagagcctgaggtggtggaattcaggtaagaaacacattgtcaaatggaccgctgagggcgcagtcaaaagcgaagttccggatattgtctggtgcatatgctgagtattctgcgacgttgcaggcagacgtcatttgccggggatatagttgtatcctgctaagagttcggcttataccgtgaatcaaggtggcaccgcggatcatattttagagaaattgtattcgtccttgacagagtagtagtattctgtcaggggcgttttttgtttatcccaattgtgcataaggaggtcattctatgaagttttttccggaacttgaggaagttaaaaagatcgcagcagatggaaaataccgtgtactgcctgtaagctgtgaaatgctttctgattttaccacacctattgaaaccatgaagatccttaaaaatgtttctacccattgctacatgctggagtcagccatggcaaatgataaatggggccggtacacatttatgggatatgagccgaaaatggagatcacctgcagggacggggaaatgaaagcaggcagtttttccgtaaagatagaggatccttctaaatttttaagacagatattagcggactataaaagtccaagatttgactaccttccgccatttaccggtggtctggtgggatatttttcctatgactatctgggatacagcgaaccggcagtgcggtgcaaggtggaagatacggaaaatttcaaagatgtggacctgatgctttttgacaaggtgatcgcttttaatcacgtaagacagaagatcattttaatggtgaacatgtctttggatgatgtggaagttggatataacaaggctgtaatggagttaaagcagctggcagaacttctgaaaaaaggagagaaaaagcaggaaccggggggtaagctgacaggagaagttacacctttatttaacagggaacagtattgtgccatggcggaaaaggcaaagcattatatccgggaaggagacatttttcagatcgttctttccaaccgcttaagtgctccttttgagggaagtttattaaatacttaccgggtactgagaacattgaacccgtctccttatatgttttatttttcaggaacagatgtagaagtggcaggtgcttcaccggagacactggtaaaactggaagatggcgtgctccatacattcccactggcaggaacaagaccgagaggaaagacggatgaggaagataaggcattggaagaggagcttttagcagataagaaggaactggcagaacacaacatgttagtggatctgggaagaaatgacctgggaaagatcagtaagtttggttctgtaaaagtagagaaacttcattccattgagcggtattcccatgtaatgcatattggttccacagtgcggggagagattgatgagaagcatgacgcactggatgccattgaggctgtgcttccggcaggaaccttatccggtgcgccaaagatccgtgcctgccagctgatcggggaactggaaaataataaacgtggcatttacggaggagccattggatatattgattttacaggaaatatggatacctgtatcgccatccgtattgcatataggaaaaatggcaaggtatttgtaagaagcggcgccggtatcgtagcagactcagatccaaagaaggagtttgaagagtgtttaaataaggcaagagccgcattaaaggcactggaaatggcacaggaggaagaattatgatcttattaatcgataattatgacagtttttcctataatctttatcagctgatcggtgagatcaacccggatattaaggtgattcgcaatgatgaaatgacagtggaagagatacggcagttgaaaccggaacggatcatcctttcaccgggacctggaagaccggaggacgcaggggtgatcgtggatgtggcaaaaacgttgggaaaagagataccggttcttggtgtctgcctgggccatcaggccatctgcgctgcttttggagctacagttacttatgcgaaggagctgatgcatggaaaacagtcggaggtgacgtttgatacagagtcgttgctgtttaaaggatgcccaaagaaggcgccggtggcaaggtatcattcactggcagcggatccggagacaatgccggatgtgctgaaggtaacagcagtgacagatgacggggagatcatggcagtacagcatgtggaatatccgatctatggagtacagtttcatccggagtccattatgacaccggatgggaaagggatgatacagaatttcctggaacattgatcgttcagctttcctcctgcgtcagcagggggatgacgagagcgggaagagagtacagaatgttttgaacggtttgaaatttttaaaatgagcagaatatcaggaggtaagaacgatgatcaaagaggctattgtaaagatcgtaaataaagaggatttaagttatgaagaagcatataccgtgatgaatgagatcatgagcggagagactacacctacccagaatgcggcatttctggcagctctttctacaaaaagtgccagagcagagacgacagatgagatcgcaggctgcgcagcagctatgagagatcatgctaccaaagtggaaacagacatggatctgtttgagatcgttggtactggcggtgataatgcaggaagctttaatatttctactacagcggccctggttgcagcagcaggcggtgtaaaagtggcaaaacacggaaacagagcggcttcttccaagtgcggaacagcggactgtttagaggcgctgggagttaatattgagcagagtccggatctttgcagaaaattattaaaagaagtgggaatgtgcttcttctttgcacagaaatatcatacttccatgaaatatgttggcgcgatccgaaaagagctgggatttagaaccgtatttaatattttaggaccgctgaccaatccgggaacaccgaccatgcagatgttaggtgtatatgatgaatatctggttgagcctctggcaagagttctggtaagtctgggaattaagcgtggtatggttgtttatggtcaggataagttggatgagatctctttaagtgcgccgactaccatttgcgagatcagagatggatggtacagaacgtctgttattactcctgaggagtttggctttgaacggtgtacaaaggatgaccttaagggtggcacaccggcagaaaatgcagagatcacacggtctattttaagaggtgaaaagggtcataagagaaatgctgttctgatgaatgcaggtgctgctttgtatattgcaggggaagcagaggatatgaagtccggtattgccctggcagcagaactgatcgattctggaaaggcactggatacactggagaaactgattgaagtgagtaacggagaggcggaataatatgacgattttggatcagctggcggatcatgccagggagcgggtggcatatgggaaagagaaagtggctgcggatgagatgagaaggcgggcctttgatcttggaagagagggcaggctgggcagttttgcatttgagaaggctcttaagaagcttgggatctcgtttatttgtgagtgtaagaaggcttctccttctaagggactgatcgcaccggattttccttatttaaagatcgcaaaggagtatgaagcagcgggagcggactgcatttcggtgctgacggagccaaagtggtttttgggaagtgatgcttatttgagagagattgctgagagtgtgggaattccctgcttgaggaaggattttacagttgatgaatatatgatttatgaggcgaaggttctgggagcttcggctgtgcttttgatttgttctattttgtcaaaggagcagttaaaggaatacaggtatatctgtgatgaattgggactttctgctctggtggaagctcatgatgaggcagaggtggaaatggccgttgaagcaggtgccagaatgatcggagtgaacaaccggaatttgaaggatttttctgtggatacggaaaacagtagacggcttcgcagcatgataccggcagaggtgctttttgtatcagaaagtggcgtaagggatgagaatgatgtgagaaagcttcgggagattggggcagatgcagttcttattggagaagcactgatgcgggctgaggataagaaggcgaaattggcggcgctgagaggttagaaaacggaataagtatgtgtgttgacaaagcgggagtataaacagatgaccagagtgaagttgtgcggaatgatgcggccggaggatatccaggcggtgaataagatcaagccggagtatattgggtttgtgtttgcaaagaagagtcgcagatatgtttctaaggagcaggcgaaagtgcttaaggagatgctggatccggcggtgaaggctgtaggcgtatttgtgaatgagccggtggaaaatgtggcagatcttttgaatgaagggatcgttgatatggcgcagcttcatggggcggaagatgaggcgtatatttgtcggctgagggaacttactggcagaggtgaagatacgtttattataaaggcggttcaggtgaagtcggaagcggatgtgaaagcgggagagcagtccggggcggatcttgtgttgtttgatgccggcgccggtgatgggaaggtgtttaactggaaattactggaaaatgtgaaacggccttattttctggctggtgggctggatccggagaatgtgagggatgcggtggaaaggctgcgaccatttggagtggatgtgagttctgggattgaaagctttggggtgaaagatgctttgaaaatggcgaagtttgtggcagccgtgaggaagggttccgggagcaacgcttttccgtaagaaacggccttacatattacttgtcattgtccactggctttcgacatgcacctgttcgcctgtatcggactacgtccgctacattcggacagctgcgctcaagatgtggacaattgacaagtaagatgacggcctgtgtatacaaggaataactgaaaaataagtgtgattattaaaataccgtctgggacagcgaaggattggattgcgagaccgtttcaagttttgtgtaaacgttaaaaactgatataagatttgtgaatagttacaatgggcagagccgattttccggattctgcccatatct

SEQ ID NO: 3635 - DNA, 1586 bp, Unknown
  gut microbiota DNA sequence
gatcatatttgatgcggataagaaaggcagctctaaaacggtaagttatctggcatatgatcttttgttttacgtgaaccagtctgatgtgaatatggtcttttctgggactccagaaagtattgtcacgcagatttgccagaagctggatattccctgcggagaactggccccgaccaatggagttgtagtgaaatcaccgtgttttgggaaaaaggcatataaggcaatcatgatggcctatacagtagcggccaggaagaatggtacaaaatacattcctctgattaaaaatatcaatcggctttgcgtgattgaaaaggggacgttgtgtggagctgtgatgaccggagactacaacctaattgatacagagtataaaagcactctgcagaatctggtaaaccgtgtcattatcacgaacagcaaaggaaaccagatcaaggtgatagaggatgcggagtccattcaaaaatatggcctggttcagaaagttatgaaacagagcgataaagaagatatttctgcagaagcacaaaaagcgctggtttccgtagaaaattctggatctgtatctggagtaccgaatgatttcagggcggtctctggctattccattattgtccaggatgaagtttctggactgtatggacagttttacatagaaagcgatactcatacctttaccaatggaaaagcgcaaatggatcttaccctggcttttgaaaatctgatggatgaggaggaaatcgagaaggacacgaacaacaagaaaagtaagtaggagggactgacatgacagatcataacatcgtgcgaatggttcacgcaattgaagaacgtatatccggtggcggagctgcggatataaactccggtggcggggttcaggcaagcgtagatggaacattcctggctgatgtgatcagcgtgaagcctttgtctattcaactgcaggggcagacagtatctgctggcatttacatcaacccagcattgacggtagcggcatcggatggtggtgatgagattttaaagccctttgaaacaccgtttgaaccggctgcagcatatgaatttttgaaagaattccatgaaaaatatgtaatcaagaaaggtgatacggtggtggttgtcatgacaggtagcggcttttatatagctggaagggcggtggcaggatgagcatttttccatttattgatgcgtctggggtaacagatacgaaaaaagtaactgatttaccattactgaaagaatatgcgtatgattatgcgaaaaatgaactgcttctggatgaaaatggctgcacttatctggtggaaggaaatgctgcactccggatctggatatttaaggcacttacaacagcccggttccgacacgtagcctattctccggccttcggagaagaatatgaggatcagctcattggacattccatgaacggagaaatagtaaagtcagaaatgaagcgctatattaccgaagcgttgatggtaaatccgtatatcaagaaactggaaaattttaattttgagaccagtagctggggaatgaaagtaacatttgactgtaccagcatt

SEQ ID NO: 3636 - DNA, 234 bp, Unknown
  gut microbiota DNA sequence
cgagcaaaagcaatgctttcaaatggcaggcataagaaaaaccggaaaaatccgaatgacccagcaagatttattgataaaacagctgttacaaaagatggagaaatggccgatatcctatattttctggatgaaaaaaagattgcacaggaagcacagtacgatggcctctatgctgtatgtacggatctttttgacgatgagccggaagatattttaaaagtcagtgaaagc

SEQ ID NO: 3637 - DNA, 508 bp, Unknown
  gut microbiota DNA sequence
tgattgaaatctaactaatacttattctaatccaaaacaggcagttttgccactatttattcaagattatctggacatttgtgatccggtgctgacatttgatcgatttatgggagaaatcgatttggagaaatacctgaaggaaatcacgaaacatgaggtgggaagacttcggtataacccggtcagtatgctgaaaacaatcctgttcggatttatgacaaatggatatgtctctcttcgtgagctggaagacagctgcaaagtgaatctaaggttcatgtatctgatggatcataaagccccatcctatcggacttttggatattttatcaatgagatactcagcgattctattgagaaactattctgtgatatcaatcaaaaaatttttgagaaagaacatacggacctgcaacatttatatattgacggttctaagtttgaagccaacgcaaacaagtattcctgggtatggaagaaagcgactgaaaaatccagataccgc

SEQ ID NO: 3638 - DNA, 197 bp, Unknown
  gut microbiota DNA sequence
caggaaatgtgctcggatccggtcgtttcgctggacaaaaaccggacgggcagaaaaatccgttttcatgatccgaaagcatgcttcaatctgccaacggctttcactgacttttaaaatatcttccggctcatcgtcaaaaagatccgtacatacagcatagaggccatcgtactgtgcttcctgtgcaatctttt

SEQ ID NO: 3639 - DNA, 1806 bp, Unknown
  gut microbiota DNA sequence
ttgtttcttcaagctccacttctttttcgatcttaaatatttttgtaaaaaatgaaatggcctttgaaagaattccttctttcttctcttcctccagtaccggaacatccagatcttctcccatcagctccgcatattcggactccgtgatactatgaacggcgccttgctccactctactcgtgaaagaatctgtctccggagcagcatcttcgttaatctggatctgattgctgtattcattcgcaaaaaatgaatttgcaccattttccgaagaatccgttgtgatcacctcgattggaaggtcatcattatgcagatcatggagaatatacccatttcgcgcagtatcttcctgataggtatagctgtatttcaaagcaataaatttattgtatgtcgcttccgcatcctgcttacagccagaatttacataggaatcctccccggatgccgaactggtcggccctgcattcggagtgcttccctcctcgccgccgcttgatgcaatggaagagatttctccctggctgacttccgacatcagccaatgaaagtggactccctcataggtacctgcagatgcagtttcgtcgcacgcatcaaaacattccagccagccacttgcaagtcttcggttttcttcctttgcttcatcaatttcgtcctgatttgtaacttctccttcctcatcttcttcctcttccgggacttcgacaaaagccggtgccggatgtccatcacagaaggttttatcgtaatgatatttgtgctctacagtattggatgcataaccctcttcattggtcgtaacggtcgcaacaaaccgataatcatcccatacaaccggattatccaggtattttgacagatacgtttcatgatctgttccaccatacagttctactgctccgtcacgttccaggttgacctgatccttatcatcaaaacgctcataaagccggaaacttgatccctccaaagtttctcccatttcatgatcatacttagtcagctgcgtattataagtagaagtccagtcctcctcatgccgataacagttaaattcaaggctgccactgctggaggttccagatggatacgatggcgtatttccaccattcccaccaaaaccttgctggccccagaaaattcctgtaccgaaaactcctgatgctcccacggacgcataatacacactgctaggaagagccatttccacgtatgccagtctctgatgctgctgggccggcactaccccaattcgcgggaatttcttatgctgaccagcacactgctgaagcacccacagctgcagacactgttcatacaaatctctggccgaagcgaatgttcccattgccgtttcataccttgttcctattggatcaaactgcacatataacggagtcgggctgtttccaggattggtaaagataatctccgtatccgtttttacatacgtccaaccattcggaatttcagatacgtaagagccggcctcccccgtcgcagaaaatttcaacggtaccgactggataaacccggcatctgagccgtcctgcgcaaacttaatacttaaggttccatctactgctaccgctgtttccggagtggtatggcctgccagagttgctggcaccagtccacccattgtagatccggaggaactgctgcttagtaacccagctgcctccaataatttgtctgcattatcactccagacctttacccacggatattttgccctggtggcagcactgtgtaaatacagctttaaatcatcctttgttactggtgatgtca

SEQ ID NO: 3640 - DNA, 1550 bp, Unknown
  gut microbiota DNA sequence
agatatacaaaatagcaacaattttaataatttaatcaacaatatttaaaaataagcgaaattattaatagtctcacagtcaaaaactttcatctgcgttgtttttaagaaaaaataattgtaaaataatgtcataaatcggattatgtcattattttaatattccaatattagataccatatccggtttaggcattttacctaaaaaacgaccattataaaatcaaaaaaaagcaaaacttccattcatttattttctgaacaagaagttttgcgtttgtgctctttgacacaaacgcacgttcgctatataatcggagtgtccaattaaaacggaatgcgcatgaatggagtaatgtgatgaatacagtcagttccactactgttgatattaaaaaaaccttattgcactatataaaagcggaatttaaagaaaaagatctcgacatgctgaagtccttacttggcagcatttatacagaattaacgaatacgccaaatattctgccccacttagaaaacccgaattttgcagctgatcctctggattgctgtgacagaacaaattccgataccattaccgacacaccctctttctctccagataatttgaaaccttatcgggattttttaatagcaaatgagcgatccaagaatacaatcagcaaatacatttctgatgtaactgacttcataacttttttgtccggcgcagaaatttcgaaagaacaatgcctgaattataaaaaatatctattggaacagcattatgccgtttccacggtaaattcaaaattgtgttccattcattcttttctgacctttttggaccgtgctgattgttttgttcagttagaaaaagttcaaaagaaagaattaaaagccacctatgctattcttaccccggaagattaccataaactcctggaagaaagcagtcgacctcaaaaaagaaaggttaacctgatgatccgcgccttcggacaaactggtatccgtgtttcagaattgcagtttattaccgttgaatccatacaacaacaggaaatcacaattagaaataagaataaaaacagaaaagttccattaatccgggaacttcaggaaatgcttaatgattatgtcattgaaaaaaacatcccatctggacctattttcactgataaaaataaaaaaccattggaacggcaaaatatttataacatgatccagaccattgctgccaatgccggcattgataaaagaaaggcacatccccatgcacttcgccacttttttgccaaatccttttacgacaagacgcatgatttggtcatgctctcaaatattttaggacattccgatatcagcaccacaaaaaactatgttaccggtacgttcgaagaattgtgcaacgaaatggaagaaataggtatcttataatttccaaatccgccttttgcattaagggcagcttcgagatatagctgccctccgcataatctatcccccaattttctgcaccatacaattcactatttaatttcagaaaaaatgatcccctactacat

SEQ ID NO: 3641 - DNA, 1285 bp, Unknown
  gut microbiota DNA sequence
aacgatgcgtgatgatccaagccttcttcatgaagcatacctgcagtttctccgactggaagactgcaatgtggcttataacgacacgctggagcaggtaattgatgcaatcgaacaatggcttgcctctggcaccttatcccctgtaaaccttacggtttccaaccagaatatgggtgaaacttttggaacggaggtggatgtgtaatggcaaatatctgctgtgatgatgtgatcttttatacagaaggaaatccggaaggactatatgacttgtgggaggacctggaaacctacatcattctgaaccagaatcctgatttatgctggattggcaatttattttcccacaagaaaatagattccaccggaatatctcttcgtggaaatgtcagctacatggaatggaatgatacgtatattctactttctttagagacagcatggactccactttatgaagcatatcaggcgatagccgctgcatatcatgttccctttgtgatgcaaagcatagaacctggagaacgaatttattataacacggatgaagcacacctatttttccctgaccgatattgtgtccgcttatatgaagaaagcctattgactccatgtggcttaataatcggagaaaagctggaagacggtgaaccatttgaaacggaaacagacgtattagaacgattcagagattgcggatatccagcagctacactaaaagagttggagctcatgttcgatgcggatgaacttattatttttgaatttacaaatccatatttggatctggagcagaaaaatgcttgtgcatgaaacttctcccctccacaccaaagacgattatcatcagatttaaaggaggaacaccatgactgatttggaactggatgtctgggatgcatggctcagggaacgtcaggaacatctggaagaaaccctgtccaatatctcaccatcggaagaaccctgcagatattacctgctaaccggatatattcagggaatgctagaagctcttaccatgcttacgactgttgaggatgggaaacgcttcaagatcaaactggagcaatttcgccagaatctgctcctctctggagattacgatgctaccggtaactataaacaggcagtgaagaaaactgctgtttaaatacttcgagccgcccaatcggacggctctttttatgcccgaaaacggtagcctacaccacgtatcgtttctatgtagtgcggttcttccggattttcttctattttctttctcagattcttgactaac

SEQ ID NO: 3642 - DNA, 219 bp, Unknown
  gut microbiota DNA sequence
gggcatgaagatcactaccctgatcctcattgttatcatcttctccatgatctgctctgcactgggaatcctggcttgatcatttataactaacataactaaacggacatgtcgcctgattgtgacatcaccataatgacggttctgcctgtcttatttggcaggcagagcccttttttattcaactaaggggagattatcatatggttgaagtaagcg

SEQ ID NO: 3643 - DNA, 281 bp, Unknown
  gut microbiota DNA sequence
tgccaacgcagtattttccggatggacaggcatctgcgatcggacgccacatcagagccagtctgatcatctggtctccgatggagagattgccgttttcatactggcaggagatgatgttcatggacggagagccaatgaatcgggcacagaaaatacttgccggcatattgtatacatggcttggcgtgtccagcatttccatatttccgcgatacatgatggcaacacgctgtcccacggtcatggcctcaatctggtcatgagtgacataaaccatg

SEQ ID NO: 3644 - DNA, 267 bp, Unknown
  gut microbiota DNA sequence
atacaacaaagtatgaacagcgcaggtggcaggtgccacgataatgcccggtgtgagagcatgtgggcaagaatgaaaacagaactgctatatgatcgttatgatacagagaaaatgactacggatgaacttaagacaatcatctggagatatttcaccagttactggaataacaggaggatctgctccactaatagaggtcttcccccaatgatcaaaagacaacaatattacgcttccctgaaggaagcagcatagggttcaaaa

SEQ ID NO: 3645 - DNA, 443 bp, Unknown
  gut microbiota DNA sequence
cggatcaaaggatatttgctcctccccgaagcttttcgcagcttatcacgtctttcatcggctcttagtgccaaggcatccaccctgcgctcttattaacttgaccaattgactttcgttcgcgggagcaaactacttatctcagatgcatagcgttgcatctttggtctgggttgtttacaaaatttgttgtattgttttccacatgatcaatcacttgatcatatggcctcggatgtcttgatattcaattgaataatcaatcatttctattcaatatgcggttttcaaggtacgtatttaatgtatgttcgttcaactaaactcgaaaagacctcgttaagttttgcgaacggcctttcggccaatggagatggagagattcgaactcttgaccccctgcttgcaaggcaggtgctctcccaactgagctacacccccat

SEQ ID NO: 3646 - DNA, 1375 bp, Unknown
  gut microbiota DNA sequence
gcaatccttcttttatcagattcttcccgttatataagagttctgtcatttcaccatcagcagtagagaatgcgatacggaagttctctcctgtcaaggtaatggcatccggagtacgttcggtatttacagttttgtctactagttcccgggcagtccatgtagcattcagcagccgttctccttccggattcagttgccattgctccatggctacctgatgtcccttcggaactaatggggcttcctttttggtaaatgcttccaatttcaggaagtattcttttccatcgttaggaatcaagttcatcgggatagtgatgaaggcagaagaacgggcggccataaccgggaaatccatttcaccgctttgtacagcttttccgtctgtttctacagtccagtgtagtttgtaatcttccaaaccgataaaatcatgccagttagtcactttaatttgcttggtggtaaaggcaaccggatcaaaatgaatatattgatatacttttttcacttcccagatgtgcggatgaagtgaacggtcggcagctaccagtccgttggcacagaagttggagtcattaggaacacccacgaagcccatatcgcctccgtaagcccaaatcttgtttccgttcttgtctttgatatcaaaagtagcgtctacccagtcccatatgaaaccaccttgcaactggtcatatttataaatcaaatcccaatagtcttgcaggttacctacactgttacccatggcgtgggcatattcacatagaatcatcgggcgtgcgtcgcgttggtttacatggcggcggagcgcccagacacgtgcatacatcggacaataaatgtcagatttggcatcataaccacctccttcatattgtacagggcgggtaggatcgaacttcttggtccagtcatataacgtttcaaagtgttttccgtagccggactcatttcccattgaccaagtgacaatggcagtgatattgcggtccctcagcaccatgcggctcatgcgttgcataaacggtacttcccaatcgggataattagccagtgtgccatctttatgcgcctgcataccatggctttcaatgtttgcttcatctaccagatacaaaccgtattcgttacacaatgcataccattcatagcggttggggtaatggcaagtgcgtacagcattcaggttgaattgtttcatcaactgaatgtcttttatcatgctctctacggtgatggtacgaccatgatgcggatcgtgttcatggcggtttactcctttaaacaatacggctaccccatttatcagttgcatgccgttacgcatttccacagaacggaaaccgaaaggctgtgtgaatgattc

SEQ ID NO: 3647 - DNA, 976 bp, Unknown
  gut microbiota DNA sequence
ttttccttgagcatcgtaggtgctgactaccaatgtataaagattgggtgtttcggcattccaaggcaatatggccgggaacaagtgtttctgagcgaataaagtatctgtagcagaagttatttcctttttatgctggtaaattacattgcctttgtccataaccttcacttccacgattcctcccggatgaggcttgtggagtgtgatatccagattaaaatctccgtctttataaccatttgtcagaccggctaccagtttgaagtcttgtacacggctttgaggacgggcatagagatatacatcgcgttcaataccgctatatttccagtaatcctgatcctccaggtaggaaccgtcactataacggaaaactttaacggccagtttgttcttcccggcttttaagaacggagtaatattgaaatgagccggaagacggctgtcttcactgtatcctgccaattcaccgtttacccagcaataaaaagcggactcaactccttcaaaatcaaggaagatatccattcctttccaatgggccggtacggtaaattcacgtacgtatgctcctaccggattgtaatcggttggaacatgaggcggattggcagggaaggggtaagctacgtcagtatagatgggggagtcaaatccttgcagttcccagcttcccggaacctgtatgtctttccagcgtttggtgttataccccattttataaaaatctgtcgggcattcctcattgtttttagagaataagaacttccaggttccgtctagtgaaatgcggcgttctgtagcagggtttactgcaaaacgctgggcggcaggtaaagcctgttgtttcagtgcattggcctcattcgtataaggaatgaaatgggcatgggcaggttcacggtttatttcatttatttgtggattctgccagggcacattttcaccccaggcggaagcacaaacaaacaac

SEQ ID NO: 3648 - DNA, 632 bp, Unknown
  gut microbiota DNA sequence
cggtcttctcttcccatggatgccagaatggaatacatatagagcatctgccagtccagccggagcatacactccgtatcttcattgctgactaggatctgtttactcacatattcctcagcatcttcataccagcttccctcttcatcttcatgttcgatttggtattcccgtaatccgtatacagtaatggaacgctgcagcatgtactgggtctcatagtcatacgctttctgcagcaggtacagaagcgtatcccggtctatcttcaggatccgataatcgctctccgtcaaaaccacatcatttttaatggcatttaacatcatggcattggaaacaccacctgctgccgcgctcgtattgagtgatccaataaatgccccgtcatagtttccatccaggccgcccagatgtgtggccccattcataaaggcaaaacaggctgccaactgctccgttccccaacggtttctctgggacgggtgcctcctcgcctctgcctcatatatcttggtaagccattcccgctcatcaatcccgggagaatatgtactcgttgcggatcgtaaaccattctttgtattatccttactgacggttgctccatttcggatagccagggaccaaat

SEQ ID NO: 3649 - DNA, 256 bp, Unknown
  gut microbiota DNA sequence
tcctcctgacagattaaccttttacgccggatgcggcaaaggtgttgatgatatagcgctggaaaataagatacagagccagcggaatgatcatggtgatgacggatacggccatggcaatggtaaattcggtgccgccctcagcgctgatgtacatctggagcgccagggaaagcgtgtagttttccttgctctttaagatgagcaccggccatacatactcgttccaggaattgataaagaaaatgatcccggt

SEQ ID NO: 3650 - DNA, 11207 bp, Unknown
  gut microbiota DNA sequence
ttcctcacctacccaagtaagtccaccacgccagttgttgtctccagccgcattctttccaacgtttcctgatctgctgcctccagagcctgcaatcttggctcctgtgctgctgatccagtccgccaccttaccgatagctgagccgattccttccacgataggctgaaccacgctccagacgctctccaagatactctgaattcctgggaatacgcgctgtaccacgctgaagacaagctcgaatacactaatgcacaaatccataataggtgagatcacgctccaggctgtggtcaatacagaaccgattgccgggccagctactgcgataacttcctggatgaagcccatccgctctccgatgaagccgatcacagaacttactttctcaccaatgccatcgaatattgtactgaaaacaggggcaagcgccacaacagccacaccgatagccgacaccagccctgcgataaccggcgatgcctgagagatcaggccactgataccagaaaccacacttgaaatcaccgggagtattactggaagcatagttgaaacagtgttcacaatgcttccaattgctggggcactggctactgcagcctgaccaagggaatttgttatgctctttccgaaagatacaagttccggtatagccgctgaaaacttggaacccaggtttccgataccatcaaacgcctggttgactgcgccgctcatagaagatggcagtgcgctcacaattccgtctttcaggcccttgacgatttctccaccagattctttaatcttcggagcagccgcctttatacctgttttcacagctccaggaagcgcttttacgactcgtccaaccatcggaaccgcattcttgaacaggaacgtgctggccgtctccactacagagcccatagcgccttctacatcaccgccactcgccataaagccaagcagatttttaactgcggacttcatggctccgaaagatccgctgaatgtggtcgatgcttctctcgctgtggttcctgtaacatccagtttttcctggatcacatggatcgcgttatacacatccgccagattatccaggttatacttaactccagaaattttcccagcatcctttaacagacgctccatttccgacttcgtaccaccgtaaccaagtttcaggttatccagcatggtgtagttctgcttggcaaagccctgataagcgttctggatagaacctatgtcggtaccgaatttattcgcgttatctgccatatctaccatggcctgatccgccactgtggccgcttttgccgtatcaccctttaaactgttcagcagcgaagctgaaaagctggtgacctgctccatataatcatttgctgataatcccgctgtttcaaaggctttgtccgcattcgctttgactgtatccgcatcgtccttgaataaggtctcgacaccgccacggctctgctccagcttcgcaccttcgcttaccgatgctcccaccactgcagtagtggccgtggccgctgcgattgcaaccggtataacaaccttggttcccagttctttcatttttccgctgatagcagaaattcctttgccggtagcatccttgatcttcactaccggctcggcaacctttttcccaagatcttttacacggctttctaccgctttaactttcgttgtggccatgtcctttacagccatggccgtcactacttttttccggagcggttccattttggacttcaagctattcagtgccttggttgccggagttgcatccagttttgcctggtacttttccttccaggttttctccatctcctcacgggttttcttaacatcctcccggaaagaagtttgttctttctttatgatccggagagttgccgtgacattatccttaatgctaatacttcctatcacactcatttgtcacttgcacccccgttcccttcaaaagcaaacagctttcttctttcctctatggccgtctccatggaagcaaaataaaagagcctttcctccaggctcagattcaggatatattcaggtgtgattcccttctgcagataaaagtgcaggaaataggtttctccgtctcggcttatgagttttttaattcttcaaccacagtgaccttcttatttccgagtacaccggaaagcttcatgatctctgtagcgatttctgttatctcgctcatttcaaagatattcaccacttccggatatgtctggatcagtccctgattcatcatctcctgtgcgacttcttttaagttcggttccacaacggccagataaatcgtatatttatctgccgcattcggatcgttctcatcttcgatttccgtacactctacgatttcaggataatccaggttgcggattttaatattttcatccaagctcggaatatgtaatgtgcggtattttctgacctttttctcctgaaagcgcttgatcgccttgttagtaaaactcttaaatacctcgctcttatctttatccatgactgtttcctcctcttatgctgcaatctgatccaggttctgcagatcagacggtgtgaagccgatgctggtttcttcctcgacaattccgcctttttcccagttgaccaccggaagttcagtgtgccatacattgttagctgaccagcgctctgtctgtccattcacggcatccggatctttcagttttgcaataatctggcagcgcacatccttgcccttcttccagctttccaggatcgcttttgccctggtataaaccttttttacggtataggagccttctccctttaatccggtaatcttagagtccacatcaatgccgatctggacatcttcacggttggccgttacctttaactcgatcttagaaaattcaaagattttctcgccatcgatccaaagctctccccaggtaccggaaagagttttgttgcctctgatactctctgccattgtcattccctccttacatgtttactgtcattttcagatcttccatggcatccacaaatttcacgttgctggtcacaaagaccttgcttcccgtatttgcttcggccaccgccgtatcatccatttctgatgtgtcagtgccccgtccttccaggtaattcctctgggcatctacatctacagatacggtattgtcataactgcgatccaggacatccccaagaagctccttatggtaagagctgatggctgccacaaacatctgcttgttgtcatagtcattgatgactttgcccacataatacttttcaaatgtatcccggatatcatccatgtagagatccatgccctccacgatcttgatcttccgaaaatcttccgttttagtggcagtaaaggaagtcaggctgttcacaccgcgcccaatcttatactggctgccatcaaaggtaaggatcagttcgcctgcatcgatccgctcattcggatcatccggcacttctgccgaagaaacatcgttcaaaacataaaaggtactgcttctggaaagagacagtccagcaaggattcctgcgattcgcgcacagtattccgctgcagtatgctttttcccggtaacagatgaggtaatgttctctgtggtaaagttgataattccctcatgatctcccgcataatggggaagaactaccttgaaggtcttcttttcatcattgcggtactgcttgatccaggctccgatcatcgtagtatctgccgccttaattccagggatgcacagataattccattttaagtcctttaacttcttcagaaccgcattgtagctttctacattggtggccactctcatggcgatcacttttgaaggcgctccttcatagatcagcttcagataattgtagttatcctccgtccactgagtgaaatccacatcatccactttgttgtaaacattctgttcttcaccttccgtgtcatctttcaagataaccgccacaattcctctggcactgcgctcaatagcactaacgccttttgactggaagataaagttaaaatttggtaatcccagactcatgtttactcactctcctttttcagtgatactcccagctcctccatccggtcatttgtaaccttctgttcttcggagtgccggaaattgatagtaaaaatgtagtggagaacgtgatccactacattgatgtccgcattcccgatggtgatcttcctatcgccaaacgaaagcaccggacgaatggctgcgtcaatttcagcagctttaatgagataagtattattgctttcacccttctcatggtaggtaacatccaccatgacgctcatgtccgtgtaaatcccatccacagttacaggactccctggcttcaaatccacaaaataccaggttttaggctgttccactccatgggccgggtctgtatttttgatctcttcaaaaaagacatctgtatccggatctatcttctttaagacacggatcagcgcgtcttttatctgcaatactggattttccatcatttctccttaaaccaaatcatgcgtatttaaaaaatcagccaaccaggcccgcaagtaatctggaagcttccgatccatttcctgcagagacacctccaacatatgagcgccttttttaaagccgccgcccttcatgcgatgcccatactccacaggctctgcatattccacattattgtaaatttcaatatagtaggtgtctccccgtttttcgatagttcccaagttccaggcatcccgtaaacgtccagtctgaaccggagtcagttcttttgcttttccaagcgcctgctccgcaatgtcaatgaccatttgtttaaattcttccgggtattgccggtctatgatctgggccaggttcttttcccactcatccaatccgtcaaaggtatattctgtactcatcagaccaccgggttatccagacgaactggaacattattgtgggacggctgccgttcagcagctccagccaaagcttctataacctttccaagccgggaaattaccaggaaatcattttccaggatgtcgatctccggccttacaaaaaggctgtatgaagtatctgcagatgccgtggagctgctctgtgccaacgctccgccgctgtgggaagatagcgcacatggaacatcctgatacatcatcttcccttccgtaccgcttttaaaaacactttcaccagatggtaaagtatctttaaaaggtcggtaaacggtcactgtatcccagtaggtctctgccagaatatcagcttcctgcatggttatcctttggcaagcgcattttcttatagtggtttaaggatgtctcataattcttcatgaagtccaccgtggcgctcctggaagcgcttggatcgcggtaagaaatcgttgtgtctccacgggtgacggatgatgtttcttttcctgcggagaccagcagatctgcctttaacatatcctcggcaatctgggctgcagttccttccagacgttccggaagatcttctctacagcagtaaatcaggatcttatctaccgcccggcgcacatatctccttgcagagctttcttccgtttctgacattttcatgttatccatgacttcggctacaatcctgttttcctgttcacttgccatgcaatccctcctactttttccttgctgtctggcttttctcagcagtttcctggttctgtttcagggccacttcaagctgatctttcgtgccgtccagttcctgtttcagagtggcattttctttcagggccacctcaagctggtctttcgcaccgtccagttcctgtttcagcgcagcgttctggcttctggccgccgccagttcctccttcagttccttttccgctgcaggtgcttcgttttccggagccgctttctttgcggccccttctctgacaaatccctggctttccaatgccagcgctacaacttcagactctgtctgttttactacattgtcacgttttaaagtaatcatcccgcatctcctcctatgacagttcttcctttacgttggtaaagcaggtcttgatctgctgatccggaatccagatatcatggtacttgcggtaatccatcgcgtaagctcttgccttctggtttgtctccggatcaaagattctcatcttatctgtcttagacaccgcaacaggggcttttctcggtgtgataatccagttaatgttcttgctggatgccgttgctgcaaatccaccatcttcctgcccactggtttttccatctttgaacaggtattcggtcttcattctctcggaaccaaccgaaatcagcggatgctgcccatccaggctcttaaccttaaagcttacatctccctgcttaaaatctgttacatccagctttttggacagcttatcgctcatggacaagattgctgccaccatacggctgatggtaattaccagtggagtattatctccaacgatttcctgaaccgttgcaatgtcataatacagtttctgaagaatggtatcttccgccggaacatatccaccagatgctgtttttgctttgatgcaggccgccgcaatcgtactgtaacggtaagcatcaatctctgggatcactttggttctctggaattctcccattacagtagccgcggtcagcgcaaagttggtctcatctacggcattctcatcaaagctgaaggaacgtcctctatcctgggtcattgttttagtctgatacttgaagtttactccaccagctacaaaaccgttctggcggtcataatcagccagaccgtccatagaaagctccgggatcttgacctctgatcctccgttatatttcaccaggttggaattgacttccatccatccggaagtagcctgttctactgcagccttatccagttcactctgaatgaccgctgctgtctgaattgtatttacgctcatgtctcatatcctccttataatcctctgatgtttcttgcgatctgatctcttaacatattttctgcgcttgctgcattgccaaggcccgccggagtctttccacgaagtctggattccaccgccgcctgaaggcttcccttgaaggtttctgttaattttgacagactcttttccatagcctcttcactggtataatccagcagttcagccaggccgaccggataaccatccttttccagggatgccgttgcctttttctgcagatcactctttaagagctttgcctgcagatctgcaatctgctcatctttctttttctgttcctcggcagccttttcctccgggcttaacttggcctgtctctttgcttcttctgcctgagtttcccagtcctgctttgctttttcaatggctgcatccatatccgcctggctgaaggatttctcctccgttttacctgcaggcggctctgttcctttttcagcagccttttcttctgctccaggttcctttttctcctgcttggcaccgaaaaggccgtcaagaaattccttaaaagcagatgctttctcctggtttccggtttctgcacctgcggcctgtcccgccgctcccgtagatgttcctgccgatgtagttgctgcggtttcagttgtctgagtgctggtggtcatttctccatccattttcatgtcctccttgaatttttgtataacaaaaacaccctctaacgctggttaaaaggtgtttaagctccatttaaacgtaattttttgtaatttaataggcaccccttcgggtgcctatcatgctttctttttctgcagatcgctgcaaaaatcctctttatagttgtttgtccccggagctgattgccttataacctctctcggtatcccgtccggatatgtatcacattttgcatagccatgatatctggtgcatgagctgcaggcgctgtcaaatgcctttggtgcttcccaccaccgtctatcagaatatggtttcttttccattacagctcctccatgtagattgtatgtccatcaactctggtaacaataaatgatgctccacgctcaaaaagaatttccttctctgttgagttatactttcgtatatctcggccattctttgactgaattacatactgtatttggaaactatcatcatatacctcggttgaagatgataaatactcattaaagattttcagttctcccggaacataagatttaacaaactcatccacatccggaattccgaaatctgaaagcgaccgttttaccgttccctcatacttcggcatcttctgaagtgcggagtccattgcctttatggactgttcttcctgctttgtcagtttttctcccctgcggagcttgtcattccaaacgtaagaagaactgcttatgtaactattcatagcatgttgctccgcgtctgtcaacggttccacaggttcttttgccttttcttttacatagcgttttttccattcttcaaactttggattgtccttcaatgggttagcgccgtccttcagcgcaaacatatcaatccgcggctttgctctggtagtacatttacagttcgggtggatcggcggcagattgactcccgcctcggcttcagataacttaaatgcctgaccattcaaagcctggcacatctcacagccacctcccaggaaaatgtattcctcaattccaagttcctgataggactgcatctggccttgattagaaaagtaactgctttctgttctcaccaggcgctccgcatttttacgcccccggtgcatcacatcatctatggattttgccattttctggacgctggccccggacatgaagcccatggtcagttcccttctggcaagagccgccagcttatccgtatcctcccacagcgcctgggaataatttttcccagaccacggaaactccagaatgcgcttcagcatcttctcatcaaccttcgccacagtaaaacctactcccatgatgctctgaatatcatagcagctacggtaataattggttttgaacatatcactaagaagatctgtcagctttgtttccgtatctccggccaggtttatcatctgcagataaatctgtgaaagaagctgctcttttctgctgatcctggacttggcagacagcgtatttagctccagcagcgtcctggaatccgtctgggtctcggccacatacttatccatgctctttctccagcggctgtactcctcgctggacaggagcttttccgcttccgcgttatccagtttgttatcctgggcatacttctggaacatggcattgatctcattttccagttggttggccgtctcatcataaagatccatgatattcctggcataggtgtcggtttccttggcatttctcagaaccctttccttggcccgttcaatccattcattccgttctttctgactcatctacgccctccgcagccgttccggcactcatgccgttctgctggctctcaaatgctttggcaaaattctcataggtgccgaattcgtcaacatccttggttttttcttcctccagcttttccatctcatcatggacgttttccacccatggcagcatctgcagccttgactccgtggaaagcagtccggagagctgcgttgcgatctgtgtcagttccagattgttttccggtttgttcctgcggaatttcggagtgatgtccttataatcataatggccacccttaatattcaggatattggtaatcagctcgatccggcgctgcagcccctttttgaacttccgctctttcatggcacataactgttccaagccccagagcttataagcgattgctactccagaaaggttcccgccaaacgactcatcacacaaatgtggaacatgggacatggtatggatatcctcccgcagccggttcttaaaattctccattgcggtatcatccacctgtttcagcagccactggacatctcctccatcatccagaatgatcgcacccttttccttcatgtccttgacatcatcactgctcacatctcccagcttcaggatctttaaaatagcatcatcgttgtactggaagtaattcgctgtattgctctgggccttattgtaggcatcaatctccgtgataacgccctcaaaatctccccggcgctcctcattattgatgtactccacaaaggggacatcctgccagtaatgatcttcaatcgcctccaggttcaagtacccgttattgaatgaccggaaccggagaacctggtacgcattccagaactccaccttcaagatcacattcttatctttatcgacagaccggacgctcctgatcgccgccataggctgggcgtggccgctgtcactctcataaatcatgatcagatcggacggtgccacctttgcaaaacggatctgtgcgtcctcatcaagatataacatttcaaagcagctcccacagatgctgcactgtttagccagctccatgttatgatcctgctcatcgttataatcaaaaatatcctgcaccgtctgcagataggcatcatcctgggagttatagacaaccggctgcccaacaaaataactggttgccgtatccgtgatgtacttcgccatgttattaaccagacggttgttcggtgctgtactatctttcttggtctctgaaagaattcggtgctgccccacgtagtaatcagtcagcatcccatatttcagatccatcaggttttcatctatgatctcccgaatatctttttctgtcaggctttctgcagaagccctgtccatataaataaccggcataatataccgcctcctttacaatccagccgctctcctgtccatgatccggaaccgcttgcttttcttggcgattgtccggcagccttccagggcatccgggccatcatcgtgagcgcccatcgggaagtggaacatctgctccaggagccgtttatgctttttattgaatttgatatagtggttctttacatctggctgcatggtctgaattctcatggtcttatcgctggtctgcggtacttcctcaatcgggaggtacagaccggccctggcggatgccttggccagctcctcttttaagaaccactggaactgtacggtctcagcaccgaactttttatatccccgtccaaaatcacgcttcagccagcgctctttttccaagatatccgtgatgatacgatccggatg

SEQ ID NO: 3651 - DNA, 1255 bp, Unknown
  gut microbiota DNA sequence
tacatgtaaccagtaactttgctttttgccaatgtgatgatcgcagaaaaatcgcttttcttggtttttccaagagaaggatcgacaaatccaaagaactgaaaatccttgtccttgaagtccatttctgcttcgttatagtagtcgaaccattcctcgttgaaaacacagtcttccgggttgatcggttcattctgttcctcagagttaaaggaagcctctccctctgtcactttcattaccatcaggtcatagtaagagagcttttcctcccagagaacttctgtcccagccaacatcttttcccggtgcgcttcaaagaactttcgtgcattttcctcatggtcttcatcagacaggtcagtgaagatattttcccactcctgccacaggtctgcttccggtgaaaacgatataactgcccggtacttaatcgccttgtatccagggtttttaagagtattcgccagcaagctgtcgtaatggagcagggttccgatgtagacaatatctgtataatcatcaccggccttagaaaccgcttttttaaaccagctatccagctttgctctttgctctggtgtccggacattttcatcattctcaatatcatccaggatcagcagatccggtctccagttccggtgcttcctgcctcggatcttcttgccagagccaatcgcctccaccttgatattggtgctggtcaccagaacattgctcctccagacttttccggtcagatctccaaaatcttcccggatcgcttcgttttcttcaaactccacacggatgttatccaggaagccctccgcctgatccgaactatcggagataatgatcggataatgcttatacccatatacaacagcgtggatcgttcctttaaacgtcagactggtagacttggcatgtccacggggagctgccactacacgcttgcagccattcatccggctgatctgcttgaccagcttcggtgtgcttggtgtaagtccttttaagactccatcctgccagatagcatccagttcccgatggaactccggagacggtctggaaaaataatgtggaaagtaggcccttccgaagaactccatatcaacagcaccaagccgctgccggattccgcctttcccagtcagagccgcgcccgcttcataatctttcctgatcctgacacgctctggcgaatcgtccctgtttaaaaatgtttttaaaagaccagaaagatcgtttaaagcattctcctgtt

SEQ ID NO: 3652 - DNA, 1016 bp, Unknown
  gut microbiota DNA sequence
gaaaggtatggatcagctccatagcgtccttccagatactgcttatcgtaggccgcggtatttttgacgcggtcgttatcttccccacggatttcatgtaacgaatagatttcgctttcgtaggaagcattctccgcggcaaaccagatctcgtcacggcggaatatggtattttttaaagtacacatgtcatgggatgtgaataaaagctgggctccgtatttgttgatctctttatttttgaacagggaaatgacatagcgcaaaagcttcggatgaagctttgcatccagctcatcaatgatcaccatgcgtccttctctgagggcaagcaagatcaccggaagggccgcgataagcttcttggttccatcggattcctgggagaatggcaattcatattcctgggaagataacgtgcgctgcatgaagagctgctttgtatcttcatcatagcggtacccggtgatatcaatatccatatcatttaaagcgcggatgaactgctccttatatggcgcatctttggctaacagaatctgatgttccactacgggatttgcatagctgcggataatgcagctttcaaaccatgtaataacctcgctgatgaccggaatgtcatagttaatggacaggaaagaaagatacggcatcttagggttaatgctggtgttcaggctttttttattaatcgtatagccaagggaaatgctgtcagcctcacgttcaaaaatcatggcagttttcttcccagtgactgcttttctgtaaagggattccgatataacctcatcattttttaaggcgagatagtagcagtattcattcttctcaatcctgaaaaatatccggaattcgatcggttcatttttggaaatctcatcaaacagaaagggaactgcatcaattttctgctggaggatgaaaccctgtctgtttttccctaattcattcaccggttttacgatcgtagagatgacgcaagcaagcgcctgcaacaggtttgactttcc

SEQ ID NO: 3653 - DNA, 1708 bp, Unknown
  gut microbiota DNA sequence
agtgatatcaatatccatatcatttaaagcgcgaatgaactgctccttatatagcgcatctttggataacagaatctgatgttccactacgggatttgcatagctgcggataatgcagctttcaaaccatgtaataacctcgctgatgaccggaatgtcatagttaatggacaggaaagaaagatacggcatcttagggttaatgctggtgttcaggctttttttattaatcgtatagccaagggaaatgctgtcagcctcacgttcaaaaatcatggcagttttcttcccggtgaccgcttttctgtaaagggattccgaaataacctcatcattttttaaggcaagatagtagcagtattcattcttctcaatcctgaaaaatatccggaattcggtcggttcatttttggaaatcttatcaaacagaaagggaactgcatcaattttctgctggaggatgaaaccctgtctgtttttccctaattcattcaccggttttacgaccgtagagatgacgcaagcaagcgcctgcagcaggtttgactttccgccgccatttgggccatagacgacattaactggcagaagatcaggggcagaagtctcagtgatcagtgtatttttgaattcaggaagtactgcagcctgataatctaaagtagtttcatttttgtaagacttaaaattttgaaaagtaaactggcataacatgattggaagcctcctttcccttatagtataaccacaaaaaatcaaaatatcaagttatatattcgatataaggaaataaatttatgaaatagattataaaacaatgattttacgactctttatgaccttattcatacgtcagatagccataaaaaaattaatgaaaaatttttagagcttttgaaacttttcagggtttcaatacgtctaattagtgtaattaaaaaaatcaaatctatttagtttggaggctttattatgaaaaaaagaaatcttattgcagttttgatgatgaccgcggctttggctgctggatgcggtgccaaggctgatacaaccacagcagcgcctacccaggcggaaacgacccaggcggaaacgaccaaggcagaaacaaccaaggcagaaactacccagagcgagacaactcagtctgaatcgcagaaaacagaggaaaaaacggaatctgtgacaggaaagattgaggagatcaaggattttatgttcacgatcgaaagcgataagggtacctatgcaatgacattcgataccgcaccggaaggcttatcagatgttaaagaaggagatgaggtaacggtaacctatacgggagagctcagtgaagtggatgcgtttacaggaaccattatttctgtgaagaaagcaaattaatgtgatgtgaaaacgcttaaatttatcactggatgccaggaatattcataggcctggctgggatatgtattgaagatttttaacaaagaattacggccaaaaatccgctgctatatggaaatcatgcaacagcaggtttttggccgttttttatatggccgataatgttctacactaaaatatataggatgtgtatgaatgctgagataatcatatgtatttattttcgccatatgcaaacagatatttctaaattttcattgctccctcggcttttttattgaataagagagtgcattggctgtataaattccttgattgc

SEQ ID NO: 3654 - DNA, 496 bp, Unknown
  gut microbiota DNA sequence
tttgatgtataataaaattttatgaaagtatctataataacgtcgtgctttaatcgtgcggcgacgattcgtgatgccatagagagcgtattggcacaggactataatgacatagagtttattgttgtagatggggcgagtacggatggttcgttagagattattagagaatatgaaggtcgtatctcaactattatctcggagcctgatcatggaatgtatgaagccattaataagggaattcgtgtggctacaggtgatgtaatcggattactacattcggatgatttcttctatgataatggggtcataagccgcattgtggaacacatgaagactactcgagcagattttctgtatggtgatggactttttgtgaatcctgataatacagacaaggtagtacgtaactggattggcggtgattatcgtttatggaaggtacgtcatggctggcttccattacatcctacttgttatattcgccgcgaggtaa

SEQ ID NO: 3655 - DNA, 428 bp, Unknown
  gut microbiota DNA sequence
tgtacattgtggatgatacggtaggtgcagacattgctttcgctggcccgtttcaggatgtcttccagcttctggttcccacagatgccaaggccgatatcaacagctaaggcagtggaaatattgttgatgatgccgatgtttaagtttcgcaggccgcccatctggctgtggatctgctctaaagaacccatatccaccagaagtactacgtcctgacaggtgataaatcgttcaatgtgtttttccagcagcccggtgatgtcgctcatctgcatgtcaagaggcatatcaatggcatcaaatacctttcgcccgatgatctggtttgcggcatctgcaatactggaagctgttgcatagccgtggcttaagataataccggctgcggaaagtccctggatcttctggttctggttttttatatc

SEQ ID NO: 3656 - DNA, 2573 bp, Unknown
  gut microbiota DNA sequence
cccatacggtcctgccatacaatttctccattttcattccggtacaatgcttccagatttgacttcaaataggttttgaaacggaaattatcaagctttttcgccgaatggtccgatgctccattcccttcatggttaccaaataagcggctccaccagtcctcatggacttcactgtaggagttcgtattgcggtaactcttctcatcaatcgtttttgttactttgatctgctgactgatgatcctctcttctacacctacaggttcctttctggtgttcgtacccggccgctctgcaccatcctgaaatacatagtcctgtcccggataatcaagagctaccgattgtacataagaattttcctggcctactaaaaggctgcgatagttaaggtatgcttttacactggaaccttttgccagataataggaggcgctaccaacctgggtgcctgcaagttcttttgaaattccaaaatctatgcaatcctgctcagtcagggaaatgaaccgggatggaagtttcagcgtatattcataacgtgctgctgcctcgtcattatgctccgttccatatccatccgtatagttaccattttgatgggcgatccacacattaccttcctttgtgagagggatctccgtccacttgcattcatttacttccacggaaattttctctgtccgctccacataggttaccttcggaattttattgccatttttatccagaggtgtttccccggttttataaaattcagtttcggttacgacaccattcacgatatccccattctcatctgcctgtacggccggggaaaggatcgcattaacggtgccgtcctcgttcacggaaaaattcttcatttcaccgcggggatcataaatggcatcctcactgtatgcaacataaatggctctaggccgtttactgtggtctgcaggtgtacttgctacccggtaaaacattgcatctccagaagaactgtccgccggaacataaaagagcatcggataattggtccggtttgcatataaaccgaccgtccagctgtccgcatcttctttgatatagtccactccaccataattgtaataatcatgggtattgtaataatccagaatcgaaacaatcagtgaagataacgatacggcctctccgtctgttccttccttattgatcgtcaatgttacaagaggagaaccgcataccgttttatcagctgcgtttccactgctaacgccggatataccataggtatctgtctcaccttcccatacaccgcggtcaaataccagctcatccatgctcgaataagctgcaactccgcttcttttatagttcggtgagctttttccatttgtgcgaagcgcctgctccaccttgattttaagcagcgcaaagtcattatccacatctggtacagatgctagtcttaaaagaaggtcatcatcggacattcctggcacagatgcaaggattacatccgtaactttcgcaggatccaacccttttctggtcacacggattacgtttttcgcagtaaaattcacgttggtcgttttggttttaatgcttccatctgcattatatttcgggtactgatgatcgttttctgtcacaacatactccggcaggccaaaaatatttttgactggcacttcatcatagatacccgtaccggcctctacctctttcgtcgtagaaatactgtccttccggtaaaattttgctccctccggcagatttcggaatacaagatcaaatcccgaatcccctgttttttcactttcagctgtaaaaaacaactggttgtagtcaggatcttccacatctccggtcggttcatcactgatctgctcctccgcggtaaggatccccacaattccagcataaccggtcaaatcgcccggaactcccgcatttacatcctgtcccagattggtctgctgctgcattcggtttccaatcgacaattcatatccctcagagcgagtcaattcctttacgtaatagtcccccaggatcagcggtcttccaatccaacagtttccattcgccagtttataatccggataagttcttaccacatctgcgtctgccgtatactcatcgtatgtttctgcatgatcatagagattttgtggagatgctgcattccatccctggccgcgatccacgatctcaccctcttcatagtcatagatcattcctggggcttccgtaaaggccataaacgaagcatcgccgtttttatccgttgtcgtgactgccaccagatcatttgccatataaacggttcccgtttttccgtccggatgaatgatatccgctgctgcaaacaggccgtataccgctccttctaaagtggcgtctccctgagaatctccataggaatcatatgcgtcgtttgccccattttccagatccaaatcccgcttattgatatggatttctccctccgtccggtggtcatagatacgccacatatttccgcagccatcttcatcattgcagtgactgaaattgtccgccgagcctggtgtaataagtacgcccacactcggtga

SEQ ID NO: 3657 - DNA, 889 bp, Unknown
  gut microbiota DNA sequence
atcattcaacgcttgaattttttagatgcttctaccgcattgctccgcattcactccgatgcaggaaaggaactctccttaactgccagccaatggggaaaagagatacaagtccaaacagaccagaataccgtcatcgcccgtcatccctccggtgagattgtagcattaacttttaccccggatgttagcgtaaagggcactgacaataattaccaggcaaaaatcaatggcagcgaacacgacacctacgtagccatttctttctataccggagaaaaagaactttctgccggattacagaaagcgcaattggctctaagcaatccgcaggaagggctcaaagccaacaaagaacgctgggaaggttatctcaccaagattctgcgcaaagatatgaaacctgagtatgaccgtatcgccgtgaaagcagttgttacacttatcagcaactggcgtacccaccgtggcggattgctccacgaaggaattgttccgagtcatgccgcatactacttcgtaggattctgggcttgggacacctggcgtttctctgccgccctggcaaaattcgatcctgaacttgccaaagacaacatccgcgccatgtttgactaccagcaaccggacggcatgattatagactgcatctacaccgatcctgccgagaacaatgcacgcgacagcaaacctcctctcgtatcctgggctgtagacgaaatattcacccataccaatgatacggcattcatcagcgaaatgtatccgcaattgatggcctattacaaatggtggtacaacaagcgtgaccataaccgcaacggtatgtgtgaatacggttccaccgatggtacactggaagcggcagcatgggaaagcggcatggata

SEQ ID NO: 3658 - DNA, 700 bp, Unknown
  gut microbiota DNA sequence
actaagttggaacggtggatgaagaaaaagaatagaaagcctttgatcatacagggggcaagacaggtcggcaaaacatggatcatgaaggaatttggagccagattctatgaaaataccgtctatatcaattttgataataataaggcgatgaaggacgtatttgaactggattttgatttgaagaggatcttgtcggcaattaaaatagaatacggaaaaagttttcaggcagagaataccctgattatttttgatgagattcaggaagcaccaaaggctctggcatctttaaagtatttttatgagaacgcgccacagtattctattattgcagccggttcattgctcggtgttgcattgcatcagggaacgtcctttccggtgggaaaagtggattttttaaaactctgtccaatgagttttagtgaatttcttttggcggttggtgaaaatgggctgtatgaaatacttaaggcccaggactatgagctgatcaatgcatatgcaggaaagtacgtggatctgttgaagaagtattactatgtgggcggaatgccagaggtggtacagacttatattgattccgatgatctgtatgaagttcgtgagatccagaacaatcttctcacgtactatgaggaagatttcagcaagcatgctcccaaagaggttgttccgcgtattatgatggtctgga

SEQ ID NO: 3659 - DNA, 1291 bp, Unknown
  gut microbiota DNA sequence
tgatgtgggattattaacagcgaaggccggtttatcggccagattgttgcttgacggcagccgtatttttgaagagttcaaaggggcgctcacagagcagtatgtcgcgcaggagttgcatgcagctggatatccactctattattttgcgacagaacgttcaacgggtgaaattgatttcatgctgcagggagatcttgattgcatcccgattgaagtaaaagcggaacaaaatcttcgtgcaaagagcctgaaagctttttgtgataaatatcagccggacatggcggttcgaagcagcatggcaaattataaaaaagaagactggcttattaatgttccattatatatgctcgctgagtatttaaaaaacatggtgcatgcaaattaggctataggagaaacaggctatcgtttggtggcctgttttttatttagacagatttggagtattcatattccgcagcatgggaagagaaagaaatttctataattgatgttcgatagtcatgatttttgttcaaaagggcctttggatcaggttggtagtttacatatcatcatggatcgtatacagtgattatagcagagaagaggggagaagctttatgaaaagactaaccattttgtgtgcggctttgaccgcagcgatgtttatgaatatgtcagcatacgctgggacttcagaagtggcagcagaagtcagtgccgatactgtatgtttaccgggagctgacttaacggatgtaatgggcagcggttttattttcagtgatcagcatccagaaattacggatccggaatattacttaaaagaatggtacaattctccggaagaaagggaacagagcattttaaatgtgcatggagagtataagacaccatacaacaattacatggatgaggcatatccacttttgcaggaatttcttcatagttttgactggatccatgcagatgaatataccagataccagaaagcttttgaaagagtcggggcagcataccatggaaatatctatgatgcggatgcgggatacaatcgcagtaaagagcggtggttggtccttcgtaccggacatgggatgtgtgaacagttttcaaatgaactggcagagctttgtaagctggtaggcgtcagatgtgaagcatatcagtcttcggcctatcataggcggtgtttggtacagatcggagaaatctggtacgtggttgatccaaccaataatggggtgaagaactgcaaggccgttgattatgcggcggagagagatcggtataaaaacgagta

SEQ ID NO: 3660 - DNA, 1170 bp, Unknown
  gut microbiota DNA sequence
actggaggaagagaagaaagaaggaattctttcaaaggccatttcattttttacaaaaatatttaagatcgaaaaagaagtggagcttgaagaaacaaaggcaccggagcgtgtggacggctcagctgcggatacaaaaaaatcagatgatgaggagtttcaggagcatgagacagtggacggagcggatgaaacaacagattccgacgacattgataataaaaactcatcggattccgatggtgaaattttggattccacggaagcttcggataaggatgaggaagatcaggagaataaaggtgaggtagagaatcctgacggcggaatgtcagatacggactcaaaagatgagtccgagaaaaatgattctggaacaggctctgaggacgtagcagagaaagattccgatactggtaataactctggagatctggaaaattcagacagtgtggatgacgcagcttctaaagagccggacagcgcggtgggagatgtgtctgcgagattggaaacctttgaaggaaaggtattttccggctggattgaaaaaggcattcaaaaaattttcggtattatgactgtttacgcagagacaacagagaatgctgcaggcagtgatatagaaaaagagtcggtttctgccagggaaacaaaggacgatgattctgaggatgtttctgatgaagaggaaagaagaccgtctaaagaagaaacgccaattcaggatgttgtaaaagataatcgtgatttaaaaaatgaggaaaatccatcaaaagaagaattggcagacattgattcagaagaattccttgatgacgatattgaagatgaacaggaatttatcgaggatgaagaacggatcagtgagatagaggctcttggcggcaggaaggtagatcttgcgtcagattccaatgcgacctatgtggcgtatgtggaatttacaaagcagagggatgagggtggtctgactgtatccggaagtgatgaaccggacatttccctttatgcgcagctttcaggatctggtaaagaattatttgaaagtgcctacagcacggcaaaaggttcaccgagtgtgggcgtacttattacaccaggctcggcggacaatttcagtcactgcaatgatgaagatggctgcggaaatatgtggcgtatctatga

SEQ ID NO: 3661 - DNA, 2644 bp, Unknown
  gut microbiota DNA sequence
ataaacagcgaactttccggctcttagtgtgtggtgattattccggggctctctgagccacctgtccggactttgagagccaccattccggagaatgagagccatatattccggtaattcagagccacagtattgggctctattacatatatttcctttatactgtaaatacacacctttggtgtgaatacagataaaggaggtcgtaagttatgaccaagtatcgtgaaatcctacgcttgaaaagcttaggattcagtgagaggaacatcgcacagagttgcggtgtatccagaaacacagtcgccaaggttttgaaaaaggcagcggaaatcaatctttcatggccgctggatttcgacatgaccgacagcgcactagaggagctgatgtttcctaaggataagtcggcaacgaataaacgcatgccaaactttgactacatccgcaaagaacttctgcggaacggtgtaaacaaaaagcttctctgggtagaatactgcgaggagtgccgcatgagcagcgaagagcctctaatgtattctcagttctgctactacatccagaaggatgaagaaaaacgcagggctaccatgcatatccccagaaaaccaggtgaacagattgaagttgactgggccggtgatcctgcccacatcattgatccggacactggagaaatcacagatgcatggatatttgtaggtgtattaacttacagttagtatgcttttgtaaaagcatatatgaatgagaaaactgacaactggatcaaagctcatgtccagatgtttgatttctttggcggtgtcacacctatgctcgtttctgataactgtacaaccgcagtgaatcataaaaagagtgactggtacaacactgccttaaacacaacttatcatgagatggcagaacattacaatcttgccatccttccagccagagtccggaaacccaaggataaaccgaatgtagagggagcagtaggaaagatatccacatggataacagcagcccttcgcaatgagcagtttttctctcttgcagaattgaatgcctcaatccgtgaaaaactggatgcctacaatgctcgtaaattccagaaaaaggaatgtagcaggctcagtttatttcttggggaagaaatgccattactggctccgttgcctgctacaccttttgaactggctgagtggaaacaaaccaccgtccagtttaactatcacatcgcagtagacagaatgttctactccgtgccttatcagtatatcaaaaataaggttgatgtgcgtataacagatacaacggttgaaatattttataatcacaatcgtattgcctcccacagacgactctatggaagaagcggtcaatattctacagtgacagaacatatgccacaggaacaccagaaatatctggaatggaatggtgaccgattccgtaagtgggctgattcgattggaattaacacaagtaaggttgtcaatgcgatacttacctccggcagaattgaacagcaatcctacagaagctgcatgggattattgaaactggcagaaaaacattcgccagaaaaactggaacaggcctgcgccacggcgctctcttattccggtaaacccagctataaaagtatcaaaaatctattggttgcagcaaaggatgaacctgataccggatcagaatcatctcaggcagtaaaaccacacggcataaccagaggagccagatactatggaggtaaacaatcatgacaaatcaaagtacaatcgataaacttattgaaatgcgtctgactgctatggcagatgcattccgtatccagatggatgatcctgcaatgaaggaagttccattcgaagatcggttcggtatgcttgttgatgtcgaatatagcaaccgcaaaaacaatcgtctgaaaaggctgatccgccaggctgagtttgaacagccagatgccagcattgcagcgattgattaccattctggacgaaagctgaacaaagcactgatcaaccgtctggcaacctgtgaatacattacagaataccggaacatctttattactggagcaaccggaagtggtaaaacttacatggcctgtgcctttggcatggaagcatgcaagcactattactcagtacggtatgtacgacttcctgatctattattggacttacaggctgccagggacaatggaactttctcgactgtcctgaagaaatacaccaagccaatagtactgatccttgatgagtggctgcttcttaaactgacagaagctgaagccagaaatctttttgaactgatacataaaagacgtaaaaaatcttcaacaatcttttgttctcagttccgtgaaagtgagtggtaccagcaaatctgtgatggtgaaagtactcttgccgatgccatcatggatcgcatatcgtatgattcctataagatcgatattgaaagtgttgacccagctaaagacctctctatgagagaagtatatggactggacccagcaatggcaaagtaacttaataaaaaaatggggtggctccgttagtccggacaggtggctctcaccacaccggactggcggctctgccgcaccgtaatattcagcttgcgcagcccggtacagttcaag

SEQ ID NO: 3662 - DNA, 1257 bp, Unknown
  gut microbiota DNA sequence
aatcttgagcttcaatacacggggataaagttcagtattaatacggaatactcgccagaatacttaaaggaagccgcatcgaaatacgtagaaatctggcagttggatgaaacaacgtttgtcgctggtaaaggacatcgaaagtccgtccagcagcgccattatgaaaaacttaaggaatatctgtcaaagctgaatgaatatgtagaaaagatacaaatctgtggagatggacgcaatagctattccaagacggatcattccgctactttcatgcgaatcaaaaaggactatatgggaaatgaccagctgctcccggcgtataatgtccaggtcggtgtggcggatgagtatatagcggttgttgatgtgaaccaataccgttcagatatggactgtttcatccccctcatgaataagttccatgatatttatggattctaccccaaatatccggtagcggatgccggttacggctcgtataataactatattttctgtgaacagaatgggctggaaaaatatatgaaattcccaatgtttaagaaagaaactaccgacagaaactatcatgaatacccattccgggcagttaatttcaagatcgacggggatggaaaaatgcggtgccctaacggaaagggattccatttgcagtaccgtaaggcaataaaaggaaacgcgtatggacgggaagaggaaatctatcagtgcgaagacggcagtggatgtccttacgcagaaaaatgtaaaaagggagaaggaaaccgtagcgtgcgtgtcaatcaggaactaacaaagatgcatcaggaagtgattcaaaaccttgagagtatccagggtgcgctgcttagaatgaaccgttccatccaggcagaaggtacttttggtattataaaaaatgaccgctggtataaacggattgtacgaagagggataaaatccgttcaacttgaagtataccttgtttcactgggacacaatctttataaattccacaacaaacagatgaaaataaaatcagctgcatagatttgaaaatcaacaaatttatggggtaagggggaaatgcgcttttagagactacttcgtttataattttttagtctaaaagagcgtgtaaaaaatgatttcagcattctgctataccaagactctactccgcaagatccttatacttcccagagtccccgctgtcttcccttttttgcgaaccgctcctctaaatcgaaaatcgtatacggcggcttatatggc

SEQ ID NO: 3663 - DNA, 362 bp, Unknown
  gut microbiota DNA sequence
aagctctggcagccttcatcccaggaaacatggagagcggctccgtccttgatgaggtcagcaaccatctgcatagcctgaatgccttccgggcttgcgaagcttgcctggatcttgccatctgcggtcttggtcagcatggaagtgttattgctctcgatgagtccctgctgtgcccagaagtctgccggctcttgcatatagaaaccatattttccggtcttttcctgaacagttctggcaaaggaatcaacctcttcccaggtcttcggtccctcttcggaaagtcctgcttccttcagcagatcgcggttgatgtagagaaccgggctgcttaaagaatacggtattccgacctgtac

SEQ ID NO: 3664 - DNA, 281 bp, Unknown
  gut microbiota DNA sequence
tgccaacgcagtattttccggatggacaggcatctgcgatcggacgccacatcagagccagtctgatcatctggtctccgatggagagattgccgtttccatactggcaggagatgatgttcatggacggagagccaatgaatcgggcacagaaaatacttgccggcatattgtatacatggattggcgtgtccagcatttccatatttccgcgatacatgatggcaacacgctgtcccacggtcatggcctcaatctggtcatgagtgacataaaccatg

SEQ ID NO: 3665 - DNA, 2742 bp, Unknown
  gut microbiota DNA sequence
acgcaaagcccatggcggccactgaaaaattattataatccggagaatgatcgttctgctgccgaagttacctattatctgacggaggggcagagcggtagaaaaggaatttcggaaaattaccggtatagttccctgtctgaagatgcgggactttccgatgatgttccatatccgggtgcggatattactgcagataaccggttaggaatccagtaccgggatcatgttgcaacaatgacgggaatgcagacagcttatgaggggaaatatgctgccatgctggttccatacagcgtgattgcatcaacggatgagcaggcggaggtgacagatgaagagccgggccagggaggaagtgcatcataccggggatttgcttacgataagtttgtgaaccgcttctttacggcaaagcttagaatagagaagattgactcggaaacccatgagaatatccttcacgacggtgcacttttcaatctgtatgcggcatcccgtgatgacattgagagtggccagggaacagtaaaatttacgacagaacccacgcagtttaccggaacaaaagaattcttaacggcaatgggggctaccgacatccggccgattgcaaaaggccgacttgcaaggtggattgatcgtattaccggaaaagagaatggcatcggtgatctgtatagcggcaccgtgccggagggtacaccgatctgcagtgaggatgagcagattgtcctgggagatgaatacgggaataagaccgtggcctttaaaacctattcaacaaccagggacggcctgatgcgggatgagatgacagaccagggagcgtcctatcaggaccagaatgtcggttatctggaactgccacagcctttgggcgcgggggtttatgttctggcggaagtagatccgccggccggatatgcgcggagtaagccgatcgcgatcgaggtttacagcgacaagattacttattataaggaaggaacaaaggatagccgggtattggcagtcgtttatgaggatgatgcggaacaccagacaaccaatgcaaacaaaccggaagacaaggtaaacatggcgcaggtttatgtggagaatactccgatccggctggaggttgaaaaggtaaaagaatcctatgtaggaaaggccaatacgacggcagataagacggtcagctacaagatttccggtcgtgtggatggaaaatacagcgagatcggaaaaaatccggacctggtttatgcgtatcgggatggaaaatatttgggatatgcatggcagaaaggaaccctggagtatttagaggaacgcaaggcagcaggagaaaaggtggaaatcgtttattcccacggaacatttgcgggctatgggtatgttaccaggactcttgaaactgcagatgatgaaaatggctatgtagcaggggcattgatgacattgtttgatgcaatccctgtggagcgttctggatttgagggagatgaggcttataacggactgaagattgaaagaaatctcacgaacaatatcaccagaatgtatatcgagcagggatatgccggagagaaagtagagtttgtccgtgaaaaggacgaggcgggtaaagaactggaagtgactttttcggccggtattgataaagacggaaacaccatttcggcaaccggcggagtatggtctgcggttacgttacagcggccagatacagatatcttatattatgatctggatggcctggatccatatcaggagcggtatattgacggccagttcattacctatgtgtatgataaaacgcataagcagacgcctgtggaagatgcagaacgggaccgcagaaactttgaaaagactgatatagagcattcgatgtatgtttttaaggatggagtcccatatttagagattacagaaggcgattttacaaaggtaaaataccgaaagaatgataagcagcttgaagtggaggcaggcaccaaaatttatcatttggataaagacgggtaccgcgatgctttggttgatccggcaacaggaatggcatatatcgaagaaggctgttcagacggaacggtaagaactctggtatggtcagttaatgtaagaaaagatgaattcggaaatgtgattgcccgtgataagatcacgacttcccgtattgctacggtggcagaaaataaggacggatatgcagaggatgaaacgctggatgtggtaaataattccaccgcggagataccggattcggataaaccgtcgtatacccatgcggagtctggccatattaccggaacctggaaaggaaatggtgagcaatcacacgaggagagcagcgttgagcagaaccgttttaatcaggatatgaatggttctgtcctggtagatgacaatgatggtgattttctaaatgaactcaatccggtctatgatgaccatggtttggttttgtattaccagagaagttcagaaacctacaaaaagggagaggatctttatgaccggaatggagattttgtacgacaccaggattcagataatctggaagaatacaatctgaacgcatatcgtatcaatgaacacgatgaactgtatgatgcttctcaggagaagaaaacaccggagcggaaaaatctgtatcaccggctgggtgagggatatatccttgaaaacacctggttaagctctgacaagactccgaatgatccattcgatacatttcaaacagacggacag

SEQ ID NO: 3666 - DNA, 1736 bp, Unknown
  gut microbiota DNA sequence
cataatctttcctgatcctgacacgctctggcgaatcgtccctgtttaaaaatgtttttaaaagaccagaaagatcgtttaaagcattctcctgttcttcgtagtaacttttgctctccgcttctgccatcgcgctgatcagcgccttcagacttgcatcttttcctctccgcatgacctttcacctctgtcccgcatcttttcctgttcaaattcgccccatacggctcatttttcccttatgtggtaatttccccgaccacagacctttaaacggttttaaacggcttcctaacgcttttaaaaggggaataacgggcaaagagaaaaggaaccggacagagggagccaaaaggccgggcttcgccacccgaccagcgttcttttctgctcagttccttttctttatgcctgcgtcccgaacacagccgggacgaatcaaccggtcatgttttaagttgcgtcttgtaataatggctgtgccgcatcctgtgaagcatcgcttccaacttcctgcagctctccgccgctttccacctcgatcccaagctgcacctgtctggcttcgccgcagatcgtaatttcaaaagttgccttccggcttcttttatcccactttaaaactctgttttccaactgctttaaaaccccactgatgacagtgataccaccacttccgtcttcccttaccagagtcggttccagcggctctccactgccggaaaggattctgatccattcagcttccagataggacagtgtcgatggtgccttactgtctcccaggaaccggatcactcccggaacctcttttacccggtaatagtttctggctgtgaaatccatatccaggaacacgtatcctgggaacagaatatattccttttttgtccatgccccaccagaccggatgggacggttctcaatgggaacctcggctcggattgcctgatttttcagtttccttgcaattccgctttcttctccagttttaacctgaatcacataccacacagcctatccctccattccttcgctttttttcttattgaggtaagcgctgacccgatggtacaattccggatcgtcctttgccatggtctcaaataccatgctctgaacagcttccagtcccgcctcatagttttctttgttctgtacttcgatccgcttcttataagcagcagcgcggatcagaccgtttgtttccttgatgagcttctcgataggaacttctttcatctgttcctcatccacattggtcagggcatttaaaacgtggtggcttgccagccggatcaaggcttccgaagtatccagatccggatatcggttcatttcatccatcagcatagagaaattgctctgtgccacgttaatcatctctaccgtggccagatacttccttgcataggtgcagatagccatctggctcatctcctcgccattcgccttaaggaaggccacgatctctttgtaagtgcagccagtaaggagcatctgctccacggtgtctttaagctccggcggcagtctgtccaccttccctgtgctgcgtcttctacgttcctgttccatcagccgtccagatcaaccatttcatctgtgatgccgccgccaaggagccggatgcccttgccggttacttttgcttccagcgtctgatattccacatcagccagattagccggttccctgctttccatatcacgcagatagatgtatccttcctcatg

SEQ ID NO: 3667 - DNA, 2288 bp, Unknown
  gut microbiota DNA sequence
ggagcaggttgattgtcatgagtaccctgccgttattcaccataaaagctcctgcccggagtcttctcttttcctgttctctgttcattgtgaacctccatttcttgtcatttcgatcatcatatttaacatctgttccactttccgatccaccttattgatctcacgaatgaaatcatcctttgtcaggtaattctgccggatctccttaatctccttctggcatccatcaaaatccttgctgtgagtctccttgggtgtataatcctcacggatcttattgatgtctttttttaattcgtctgtggtttccttcagatctgcttttgttacagaatcccgttctattttttgaagctgctggactgtgcagtccaactggttcatggttctttttaaaaaatatgagattacgccaatacccaacgtaatggcggttgttatgatccatccttcatccatccagtaattcctccaataaaaaaagatacactcatgtttctgacacaagtgtacctcttaggcccgtgaactgtcttttgaagcacttcactaatttacttcactttttaaaatgcttccggataatcatagatgctcatctgaccctccatgtcatcatccagattatccagttttccgaacaggataaatctcacccagcgctcggtaagtccatatttcgcggcaagctctctataatttcctccgtcaaattcttcccggatcttctgatcccgtgccgcccgttccaggctctctgccttcggaatatagattgtagtgccgccaaaagcccggacaaggcttttaaacccgtccaggcccaccagttctaccatctttctctgatcttcatccaggttttctatcttcacatggtctaacaatcccatcgctggccgcctccttccgttccaggctttttaaatacccttttaaaacttcaatcagggtatttccctggctgaaggtgagccatgcaaagggattcttcgcaatagcgtctacatgcaattctttcttaatgaccgcgcacagcctgtctcccagcggaacctcattcgggcttttatcgcgtttcttcagctcgtacattaaagcccagattttcttctgctggccgctggtcacgcctcctggtctctgtgaatgttccttcggctttctgctggatggtttcggagcagcggtaccgccctgcagatcctccagccttttgatcaccgccatggcctcctggtaggaaagttcctttatggaatccttacctgtaacgccggacaccagtacatgaagctcatcttcgcttccatttccggttattcccaaagcatgacctatagcatagattttcttcatctggaatgattctatctttcgcatttaccgttgctccttcctgctatttttctgcctctacagttaccttgattccttcatccacgaatatggctgcccggatcacttccaccgcttcctgcggtgtgcctccccactctgccgcttttaatatctgcagcatccattcccagttgatcacttcggatgccaggtaagcccagtcactggcttcctgctctgaaagtcccaccagcttcatcagggtttctgtgtccttttcatacttgcctttcagtttctttttcagcgttctctggatcttctcatcctttgtgatggcgctgatcgtagcgtccaggctgccctcagtgaaatttcccatatacatcatggagaaaagccgctttgccggggccgacatgttataagaaacatcttcttttacaaagtccttgaagacatcccccaggagcttctttaccattgtcatagagattggtttcacggtctcgctgtttccgaccaccactttggaattttcgcttccccaatattctacggttttactcttcgtgtcccggagatcatccgtagcctgcttctcgaaccaggctttgatcgtttccatttcacctttaacggcagccatctggcggtctaactcggccagacggtcaaccttcttttttacttccgccgcatccattatcctttaaactcctccatgatcttttctgcacatccgcggcagatctcaatgccgcagaccgttttaacatcgtccactgttccgcagaagtgacaggtaggaacatgcttacgaatatgtaccccgtcctcatctgcttcgatatctaccggaacacccggaagaatgccagtctcctggcggagctgacgcggaagtgtaaccgcgccactcttggctactctcttgcttacag

SEQ ID NO: 3668 - DNA, 799 bp, Unknown
  gut microbiota DNA sequence
cactgttaaatctaaaacagcctcctcctcaccatcatcaatccctgtaatacgtgccatatcacttttcttatcataggcttttactttttcaatcatgttagcaggtaagttcttcattgaaacttttgggtcatcagagaaaaactctttaccatcaaccataatctttttgatttctttcccatttatagtaatcttaccctcatcactaacttcagcaccaggaatcttctttactaactcttccaacattgaaccttctggtacaggataagctgctgcagaatactctgtcgtatcagcttttacagtaacaggaggagcttcggcagtaatcaccgcttccttcagcatgacagcatccggatccaatgtaatggttcccaattttttatcagtggcgttagcagataattgtaccggtacgagcttggttcggaatccaatataggaaactttcaacacatattttccggcttttactttggggagagtaaaccatccttggttactactggctataccggcggcataagcactatcaggtaatgatagcaattgaactgtagcctgcgctgcgggctctttagtatcggattccaccacacgtcccgaaacggtaataaccttattctgtgcaaaaattgagaaggtgcatagcaacatcagcaccaaccctgctgaaaatcttttcatttaccttatttacgattatattagtagcaataacaatgtctttttgacaaatcgaatcgtaaaaggtttaattgaaaagaaaattatcttttaaagaatc

SEQ ID NO: 3669 - DNA, 198 bp, Unknown
  gut microbiota DNA sequence
acgatggcgcccaggatcatgtgccagccaatttccgaatgattgttagttttcatagtagactcccttctccacaaatttaaattccagaagtaaaaggacaatgaacagcagcatggtcagaatggaaatggccgatgaggtgccggtccgatacaaggtaaaggcctcgtggtaggaagcgtagatcaggttgga

SEQ ID NO: 3670 - DNA, 2982 bp, Unknown
  gut microbiota DNA sequence
tgctgtctggtgtccgttcgtcgcatcttcactggtaacggtcacatgctctacctgcgttgctgttccgaagagcttctcataaggatccacatcccgcctctgattatctgcattgatgacgttctggatccatgcaggattttcagcaccattcggatcatactttgcttccactttcagctcatgctcaaagcttccttgcggagtgatctttaaatactgtttgggattctcatcttcccaacgcacattctgggtaaaactctgggccggtctgagacttgccgccaggatctgcggttcatctgcaaaaatggtttctgtcggatttttccggtctccagtgagttttctggtaatggtataggtaatattgttcttgtttaattccactccttcaacgcggagcgttgtctcatccacaatcttaaaatcaaccgtaacggtcacatttccgtaaacagatttatgatccggtgaggtgtccgcattggtcgaagctgtcaaaattgcatttttgctggttaccgtggccggaattgcgcttaagtagttattatcctgctgcgcttttaccgctttatttagcaagccattaatccaactaccagccatattcggtttgatctttgcagctgtctccacataacctgcatcggatgcatttaccacaagatcagaatcgtcaatgctccagctgtgtgttttatccgtacttgctccggtatcattgtgtacggcatttaccgtaaccggattaacattgatcgcggaaagatcatttccggtataagttgcaagctgattgttgttgccatccaatactactgtctgcaccgtcggatttttccggtccccggtccgggtctgtaccacatggaacgtcacattagccggatccatggaaagttttgaggttgttctgatgtactctacatccagctctgtgctatgctctggcatttcaaacgtatatcctccaccggtctgatacgtcatatcctgcggatttccgtcctcatccgtataggttggtggctttacgccgccaggttcattttcatccgttaccatctgataaatgcttccatttgtattcttggccgcggtcgttacatggaccgtttctcccggtctgacagcagaagaactatctttatcgatgatccggtaaaaactgttggcacctcccggatatgccgtaaaagtagccacatcctgatcaaatgtgccattggaatttgctacatctacacggctaaccgataataaatagcctttcaccggctgcccatacgttcccggtgcataatgatcaatggaaaatggcaggccattctcgtaatcagctaccgtaaaatcccggtccagcctgatgactacaatattgcggattccgtcttccagttcttcgtagaaatatctgctggcatcataagtttcattagcaccatttttcaaatagtagtgaacttcattatcattccagtatccaatatgggccgcatcggtaaccgttgtatccgatgattttccacttccgacaatcgccttggtcttattggccgcagtcgtgaaccagtacgccaggttcttcccggaggttgtgccatatttcatatcaacggaatctttgcgggtaccaataaagatgccttctcttgctgtccctgcatttgtctttccgatctctccgaacatacgagcaacaacaatttctccgccttcataataaccagtgataccgcctaccgcgtaggcaccgtttccgccaattgttccgtccacagacacattataaatggacgtaccgctgctcattgcgccgacaataccgcctacataatatcttcccaggatattatttccggtcgcggatacgctggtatcaacaatataggcattgctcacttcaccagcaataccgcctgttttactgatggcgccgaggttcactgtattcacggttgctgttacattttcgatcgtagccctggaaccagaattgcttccggaaatttttccaaccagaccgcctactgctgcatcagaagcatatccaccagacgatgtgttggcagccgccgttccttcaactgtcacgtccgtgatcacagactctccttttatctggccggccagaataccaacatggttatatccatatacacgggcatcttcgatggccagattttttaccaccgcaccatccaggactccaaaaaggccaacattctgaagattttttgaaatatttacaattttcaggtcactgattgtatggccatctccgtcaaaagtacctttaaaactattggatacattacctgataactgtgctgtattctgataccaaccaatcgggttccagtttccattattaatggtaaaggaaagatcaatatcatccattaaccgataatgggcagtatcataattacctgtaccggctgcaatcgcctgtgtcatgatcatcagatcctccagatcttcaatctgatacggattgctctccgttccgtctccggtaagatcaaaatttccatcgatccagttattccaaagatcacctacgctgctcgccataagtgccggggcatttgtccccaactgctttgcaatctgttcctgatttttttcataccaggaatacagtgcgctgtaattttcgttggtatcatcctccataacaccgtaaaaccagtcccacagagtttcttcttccaaatatgtaaaaaaccactctgaaaatgcatcactgccaatatccttcggccgactctcttcaaccagctttgtattgaagtgctgataatcttccgtgagttcctgcagtggcatcgcaagcgcggtagaaacattgcaggcactgaacatcgcagcagtcaacaccgcaaacagtcttcgatatctacgttttttcatgtcagttcctccacctcttcatccagtacggccatgttctcttctgtttctgca

SEQ ID NO: 3671 - DNA, 2882 bp, Unknown
  gut microbiota DNA sequence
tccgtccacggacacattgtaaatggacgtaccgctgctcattgctccgacgataccgcctacataatatcttcccaggatattatttccggtcgcggatacgctggtatcaacaatataggcattgctcacttcaccagcaataccgcccgttttactggtggcgccgaggttcactgtattcacggttgctgttacattttcgatcgtagtcctggaaccagaattgcttccggaaatttttccagccagaccgcctactgctgcatcagaagcatacccaccagacgatgtgttggcagccgccgttccttcaactgtcacgtccgtgatcacggactctccttttatctggccggccagaataccaacatggttatatccatatacacgggcatcttcgatggccagcttttttacaacagcaccatccaggactccaaaaaggccaacattctgaagattttttgaaatatttacaattttcaagccactgattgtatgaccatctccgtcaaaagtacccttaaaactgttggatacattaccggataactgtgctgcattctgataccagccgattggattccagtttccattgttaatggcaaaagaaagatcaatatcatccattaaccgataataggcagtatcataattacctgtaccggctgcaatcgcctgtgtcatgatcatcagatcttccagatcttcaatctgatacggattgttctctgttccgtctccggtaagatcaaaattcccgtcgatccagttattccaaagatcacctacgctactcgccataagtgccggtgcatttgtccccaactgctttgcaatttgctcctgatttttttcataccaggaatacagtgcgctgtaatcttcgttggtatcatcctccataacaccgtaaaaccagtcccacagagtttcttcttccaaatatgtaaaaaaccactctgaaaatgcatcactaccaatatccttcggccgactctcttcaaccagctttgtattgaagtcctgataatcttccgtgagttcctgcagtggcatcgcaagcgcggtagaaacattgcaggcactgaacatcgcggcagtcaacaccgcaaacagtcttcgatatctacgttttttcatgtcagttcctccacctcttcatccagtacggccatgttctcttctgtttctgcatctacctcggaagatattttttcatctggctgcccgtctttctccaggatcttctgataggatttaaacgctttataatacagcttatcgtgttctaccgcccaagtaaaaaatgtgtcatcctctacatgctctgccagcatctcccataaaaaatcttcattacagtttttcttaaaccatgctgtaaattcttccgttccgatttccggcatatccccggattcctcttctggcgcttttgacggttctttctggagttcatccgccagctccgtctcatccactaccttctcctcttcgctttcttctgtgtcctcgtcctccaactcatcttctttcgattccagttccgctgagtcagcatcctcattttctgattcaccgctctcatcagatttttccgcttcctttacctcttcctctgactcttcgggttccgattcttctggatcagattcttccgttcctgcttctgcctcatccgtctcctccaaacccgcatcctccgactcttcatggttttcatcatctgcttcttctgtctgatccatgtccaccggactttcctcatcaacaacatcttccgaagcagcctccccattcaaagctatctgaccggcaacctgatcagccagcgcagttgccggaacagaagcggtaagtgcagctgccattaagatcacaacgcctcgtttcctcattcaaattcctcctactaattttctatgatcatccctgcggtaccgcaaaggctggtcttacaccaatcgaagtagttacccttaactcttcatctgtactgccgccatccggtttcactgcctctggccgaatcattccattgaccagatccacgatataggcatacccactattggcatctgcattccccataggagaacgcagccaatatccattgcagaaattatcggttaccacttccggattatccgcatccgtatcaccaaatttccaaagataatctttatactttaaggcctcttccaccgataaactaaaaagtctggctgtcagtctctgatatccaatactatgcacagtcaaatcctggtcgcttaattcactgaaccgccccttacctgtgcttccggtaaatgcactgtccacgccaatatggcagttaaagctctgaaaaattctattctgatgcttgctcagccaattatgtatcttggaatacttataatcactttcatcaccaaaatttactaccggccccggaagaaatacctggcccataatgccttctttatccggtaaataggaatactcactcccataatttgccggaatcacctcatcacaaaggaacaatgccagtttctgatgattttcggatttatcataataattggtatctacacaccgaaattcataagttttctgatcgatcactactttctgtacatctcccactgaccaatagattggatccgcggtaccggcatccggagcaccgagtactacagccgggcgaagcagcatatcatccgtaggtgtcacgagacttgttgatccattatcatgcacaaccacaagttgtccattttctacggttcttgtaatgtaatccccctctatctgtccccgatatgcaagcacttcttcctttgacagaatagctgcatacgcaagtgcaccatccgcatcaatcggca

SEQ ID NO: 3672 - DNA, 2292 bp, Unknown
  gut microbiota DNA sequence
agcagaggtagtcttataaacccaccagaaaatccgtacatatgaaacgatccaggacacaaagatcccaaccataagaagattaagaagaagcagcatggaatcggaaaacagtttccctggattttgcaagtatcggtataccgcccatgcctctaatacgatcagaacagggtaacaaagcttcacagaccaggtccaggaaagcgatttctggatcaggaactgcttttcttcggtcatgtcccctgtacgctccactgcatcatccgtcgtataaaaaatctgccagaaagtaccgctgcattcaaaattccagccggcttcctggcactgcttacggaactgctctgctttccagctgtccgcgcctgtgagggaagaacttcccggaaccagaagggctgcatatcttctctttgcaggttctgctctatgaaacttcatgacagaaccgccaacgctctccagaaaccagccctgcgctgccatttcttccaggtactgttcaaatacatttgcttcccataaattaaaggacatccagactcgcttcttttgtttcatcatgtcatctcctttccggaaaacaggcgaatttccaattttgtatttactttcattatagaaataataggaatatctgacaagaaagatgagattaacaatttcttacatatttctgtttattgggcagaattatcaaattttacatatacgggcattcggaaagcaaaaaaatgttagaatggactcaggaaggagttcttcagaaattgccgtatcgttgtattcaaaaatttaaagaaagtgtgaacagccgaaaaagtgtaaaccggaagttttgtgatgagctattgttggaaaaagtaaaatgtatcttgtatgaaaaaggcggatagtatgtcagtgggaaaataagaacaggcgccttgaaacgagctaagggggaactttgtttgcattcagctattcaggaagcaaaagaaaaatagtgttggaggggcactatttataaatatacagtgctaaaagcgaaatccctggaaacgcagagaataacttgacaaaatatataccacgatatatactaataatataaggaggtgcattactatgatgactgcaaagttatttgaaaatggtcggagccaagcggttcgacttccgaaggaatatcgcttcaatggtgatgaagtggcgattaataaggtcggtgatattgttattctgatgccgaaggaaaacaagtggtccgctttcctgaacagcttggaactgttctcggatgacttcatgagtgatggcagagaacagcctgcggtacaggagcgtgaagctctatgaagtatatgctggacactaatatttgtatctatgcaatcaagcataagccgcccgaagtcataaaaaattttctgaagcatgatccagacgatatgtgtatctcgtccattacttatggagaactgatgcatggagtggaaaagagtcaggcggtggaacgcaaccgtgtagcaattacattgttcttgtcgtctatttctattcttcagtttgacaattatgctgcagaagaatacggaaaggttcgtgcagaccttgaacgaaagggaacaccaattggtccgatggatatgctgattgccggtcatgcgagatcagaagggttggttcttgtgacaaataataccagagagttcttccgagttgatgacttagaagttgaagattggacaaaagaataggtggctcagtttgtattaaaaaccgcaaaattcatagaccgggaattagaggattaacggcgcaaaatgaaacaggaaaatgtacaggcatcggagtttcggttccggtgccattctttttcctcgaaatgaaccaaagcgggtgaaacctcgttagcgcttaaatgattcttttccacgcttagttgcttccaataattcaaatttttcatatacgggcattctgaaaggaaaaaagtattggaattggctcctgaatgagctcttcagaagcaacagaaacagctaaaatgtatgacccgggctacagcatatctctgataaagaaaaatataagaccggcgtgacggaccggtctcattgcgtggttcaggcaggtacttacagtgtttttgcccgatctgcaatatgctgtttgaaattgatcacttcatgcttgtaatcaagattcatataacaggatgtaatcataaaatccgcagtggatttattgacggccattggaatatcgtagacctgggaaatcctcatcagggcttttaca

SEQ ID NO: 3673 - DNA, 276 bp, Unknown
  gut microbiota DNA sequence
ttgcgctgtcagcggatccgaaaagaaaatcacgaagtcaatgacaccctccacaatcttagcaccgatctgttggtctccacctaatgggccgctgttataaccttttactgtaagtccagtctgatctgtgatcatgcgggccgttgtacctgttccgtaaagattatgcttctctagctcagctttgtgttctttacaccatgcaatcagtttctgtttttcgttgtcatgagcaatcagggcaatattctttttctggccgattgtaaaggt

SEQ ID NO: 3674 - DNA, 909 bp, Unknown
  gut microbiota DNA sequence
ttttttcaattacttcagtatctgatagctcatcataaaaagaataaccatcagacctaaaaatatcttgaccagtttctgatacatcgttgttgccggacttatgagtgggttccaggtttcctctgtgccaggcatattgtttttattgctccaattttctccagttatcttctgggcatagagacggttggatgcataagagagcatttccttggcggcttctgcctcgtgttctgacaattcaagggttctgccatctgcgaaagagagcattttccatttgcctgctttctttctcggggaggcccatccgctgatgtctgtgagaagcggaagatagtaaacaccggcggcgtcctgttcgtcaatgataaaatgatgagtgaccgtgaacgatctgttgctggaaactggctgcatgagaaaatattccgtacagaaaagctctctgatctgcttgcgctgtccccatgcatcgaagcaggaaagtgtccgcatgaccggaccaatggcgataagaacgacaaacactgcgcctgtcagcagcaaaaagactgcgtatatcataatcgacgagtaatcactgaaaggcgatgccgcttcccgaagcatcactccacaaagcggaatcaccaacgcagcttccagcagggaaatcccacgaaaaattgcattctggcaaaacagataataaaagctgacaaaggtatcagcattctgcccactatggtagcgaagcggaattcgcataagcaaaagttcagacaaaaggccgacaagcagcaccacttccttgcatacaaggatataaattccatacatccatatatagagccaggttctgcgggagccataaagggccagtaaatctccagcctccgcattttccagaacactattcaggat

SEQ ID NO: 3675 - DNA, 197 bp, Unknown
  gut microbiota DNA sequence
aaagcggtcgatctgaacagcctgacagacgatgataaagaggaacttttttataaagaagaaccttacagttccaaaaagatggaacagcgtctgttgattacttactcaccaaaatacgctgcttatcaaaaagagattcgggagaaacagattgaacgagcaaaagcaatgctttcaaatggcaggcataagaa

SEQ ID NO: 3676 - DNA, 366 bp, Unknown
  gut microbiota DNA sequence
aaagctcccgttttaacaaaaaaagactgtgtgaaaggtgccatccgctggtccttaatggcagtaacaacctttaactacgatacccagcttgctccagccgttgttttcggtattggacctctgctgcgtaagatctataaagatgatgacgaatacgttgaagcattaaacaaccattataaatacttcaacaccatgccatggctggcaaatatcgttcttggtgctactctggctctggaagacaaagagggaatcacttccctggatgctgtacagaatatcaaggtcagcttaatgggacctttagctggtatcggtgataccttattctggacactgcttcctactatcatgggctcc

SEQ ID NO: 3677 - DNA, 4513 bp, Unknown
  gut microbiota DNA sequence
gccttcttcaaattcatcgtcatcaagatcgtcatcttcggtaagaaaatagtgcatatccaaaaggtcagagtctgtcatgtttttgaccaggctggatgtcattccctctggaggattcttgatgtatttttgcctaagtttctctataagctttgcatccatagtttaaattccttcctgtctgttgatgagtttagtatgatacagacaggaagaaaaatcaagcagagcggaatttgactttagccattgttctttcataaagttcttgtagagaaacccgtttgtgacgatagtagacttctaccagcgccatttccttcttgcagtgaggacagaataaaggatcatatccaaaagataaaagaatgtcctgtctccatttcgtaaaactttttatgaagcggtgtttcgatttgtgaatagcacgataaagtttagtgtcaatttcacggtgtctcgcatagagaccatagtagcggatcattttaaaatgtttttccggtataggttggataagaagtttaataaactcgattgccggaatcgtacgtttaacataagcattatcttcgtgacgattatagtgaaaagtaacattttcaccatcgtaagaatcaatccgttttaaggcaataaccggacggccaatgtatttaatgacagtattagggtcgcagagattaggtttggcatagacataaaagccgtttttgtccttgtgatagatataagctttaatctttttgaaggaaggtctgatgtgctgttccatttcattgagtaaagcggtttgaaaagtattgcgtagataagtgtaattgaaatgttttaccggccgccaaatagcattgccagaaaaaccgccttccgaaagaatacagtgaatatgtggattccattcaagagggcgtccgaaagtgtgaagcacacaaataaaaccaggaacaaagttttgagacttatttatcttattaaacatgtgaaggatgacgctttgaacagcacgaaaaaggcagtttaaaagagaacggtcttccaggaagaaatgacgaagtttctcatcgattgtgaaaacacaatgacgatgtgtgcagttaacaagcttaaaggccatactggtagagcgttcctgggaatacttcacaccgcaagtagggcagaagcggcttttgcagtggaagggaacaaatttcatgttgtggcaagtggtgcagacatacatggcaccgccaaaagaaggattgccacaattcagcattttatcgatattttccatctcagaatctctgggatggagggtatatttgatttcctcataatagtcagtaaagattctttgcaagatattcataagtctattatgcaggaaaagaggagaaaaagaaaccccaacccctcaagatgagggcactgaaaaacctacctctttaaatttcaaattttatattctttctattgctgatttcttgtcttgcatgcggattctttttatttttcacttatcagcttaataattctcttgagatttactgcaaatatagccatagctccctgcatttctatgccaataagacctgatgatgacgcaacgtcataaccatgcctatgttttaattcactatttcttgcctctattttatagcgttctttcgccatttctttgaaatgttcaatttcttgaaattgatcctgctcactatgcgaatcacaaatcagtgtttctgtgtaggttttcctttttgctccttctttataacaacccgccttataaagacatcttttacatttttctatatcgaaaaagtatgtcattcgaggattctttcctgctttttttcgcttatcaagatatttatgaattgccagatgtcctgctttgcattgatacattctggcatctttattaaattcgaattcatctggctttatacgattcccttgggtaacaatactgtttaaccgggagataagttcataatgattatcctttgcagcatcaacgttttccttacttgaataggctttgtcaccaatcacagtttcaactttcattcccgcagctctgcttttccgaaccaaagctggcaattcttttccgtctgttttttcaccactggtaatggtcgcagctgtaataattcgtctttgaaatcaacatatccaacagattcatatctttcaaacgtagtttacgaaattttgtcaaagaactgggattaataacagtttcttctggtgccatatccaaaaagtatttaaatgacatatcatacttagaacgttctacgacatcaacatcagataaatcatagatagcttttaaaagcaagtacttaaacattcgaataggcggaactgcattacgtccattatcaagacaatatttatcaagcaattcatcataaataaattcaaaatcaaccagttcttttatctgacgaagcaggttgtcttttggaaccaccagttcatatatttccatataaggactaagtactaatttctgctgttgttcaatcataaaaacaccgcctatacttgatatctatattatatcaaacataggcggtactatctactttttcagtgccctcgattgaggggcaggggagttgaataggcgaagcctattttttatgaaattatttggctgcgttatcttttacttctgcaagcatataaggattatatttacttttacgcttaaatataatataatttaagcacaaaaggaaataccgaggataaggaggacaactatgtcaacatcagatattttggaatcgctaattgaaaaagacaatggatatttgattacatcgaaggccgttgaatcaggtgtatcaaagccatctgtctcaaaatacgtcagagagcatgatatggaaaaagtggcacatggtatttatatcttagataatgtgtggccagatgagttgtttgtactccagcaacgaaataagaatattatttattcgggcgagaccgccctttatttgcatggtcttatcgacagagaatacagtcatatttgtttcactgttcctaccgggtataatgcaacacatatcaaaaagaaaaacaaagaagttcgttatgcaaacccagagattcttgatatggggatctgtgaaatcccgtcaagcagcggtaatttggttaaagtatatgacaaggaaagatgtatttgtgatttgattaaagatcgaaagaaatatgaaattcagttatatcagacagcaatcaaggactatatgtcctcgaaggaaaagaatctttcaagattgattgagtatgcggttaaacttggagtaagggatgaagtgatgatgtatgtggaggtaatggtatgattcatacagcgaaacaacttaaagacaaagtaaaaaacatgtccggcgggaatagtgaagttgcgcaagcactaattagaacatattttatggaaaggttcttagaaagagtttctgtttctgaatacaggaataattttattctgaaaggcggaatgcttgttgcttctattgttggtgtagatatgagagctacaatggatatcgataccactgtgaaagcattacctcttaatgagaaggatgctagagcaatcattgagagaatcggtgagcttcagcttgaagatgggataacctttaagattaagtcagtaaaagaaatcatggaagattttgattatcctggcattaggatgatgatagaagctaatctggaacgaatgagacaaccttttaagatcgatatttctacggatgatgcaatcacgccaggtgcagtggagtataaatacaagcttagctgtgtagatagttgtacgcgtttttcatatgtttttccagaatgttttgcacctgatcccgtgaaaagattccgggagaacattgaaaatggaggttttaacgtgaaaaagatatgtgatctgatggaaaaagttctgtatatcgtaggaatggcatctgttgcagttttctttgtgtgcaccacagtacaggtatgttcccgtgtattcggattccaggcggcttttacagaagaagttgccaacgccgctctggcatggtgctgctttatcggatcagcaccaatggttcgctccaatgaacactttaaatttacagcattaaccgaaaaattaaaaggaaaatccctttttgcagatgaactggcaggacatatatttgtcctgatcttcaacctggtggttggcatttacggcattaagctggtacagcagtttgcagcatggaaaatgacttctatgccggtaagtaaaggatggagctggttatgtgttcccatctttggccttacagcagcagtgttctctgtagaaaatatcatagattgtatcaaacatcctgacagaggccaggtagaagatgcagttgaaaaggcaatgaaggaggcagagttatgatcctggtactggtagcagcgtttttagttttattatttgcaggaatgagaccgtttcaagttttgtgtaaac

SEQ ID NO: 3678 - DNA, 335 bp, Unknown
  gut microbiota DNA sequence
caccgtgaaattgacactaaactttatcgtgctattcacaaatcgaaacaccgcttcataaaaagttttacgaaatggagacaggacattcttttatcttttggatatgatcctttattctgtcctcactgcaagaaggaaatggcgctggtagaagtctactatcgtcacaaacgggtttctctacaagaactttatgaaagaacaatggctaaagtcaaattccgctctgcttgatttttcttcctgtctgtatcatactaaactcatcaacagacaggaaggaatttaaactatggatgcaaagcttatagagaaacttaggcaaaaataca

SEQ ID NO: 3679 - DNA, 232 bp, Unknown
  gut microbiota DNA sequence
cagatttctacgtatttcgatgcggcttcctttaagtattctggcgagtattccgtattaatactgaactttatccccgtgtattgaagctcaagattaatttcctgaaacagggaagtgatcttctcaaacaggcggtatctggatttttcagtcgctttcttccatacccaggaatacttgtttgcgttggcttcaaacttagaaccgtcaatatataaatgttgcaggt

SEQ ID NO: 3680 - DNA, 2000 bp, Unknown
  gut microbiota DNA sequence
cccttgggtagcagagaatgttgatttgcttgcagatgcagttggtcttgatattacagttgatgagacagaatcatccgttggagatttcaatgttgatatttatgcatctgaaacaggaaccgatagaaagattatcattgaaaatcaattagaagacacggatcatgaccatcttggcaaactgattacttatgcatccgggaaagacgcagatgtggttatctgggtagtaaaacacgcacgagaggaacacaaggcagcagttgagtggcttaataaccatacggatgataagataggtttcttcttgtgtgaaataaagctgttccagataggagattctgatattgctccatcatttacagtagtggaaagaccaaatgattggacgaaggagattaagaagacaactgctacaaatccaacacagcagcagagactggaatattggcaggcgttcaatgattatgcctttcagaacgcagaatttaacaaagcatttaataagagaaaaccaacgacagatcattggatggatttcagtattggctcatcagcctgtcatatcgcagtatctcaaatccaaaaaagaaatgcgattgatgttgaattgtacataaatgatgataaggaacttttcagaaatttgcttttacataaagatgagattgaatcagtgatgggattggtacttgattggagagaactgccggaaagaaaggcaagtcgtattattattgaaaaagaagtgacgtttgataatcgtgccacatggtcacagcagtttgattatattatggatgtctgcatgaagatgaagaaggcattcaagaagtatttataagagggtgatatcacagaatgttgtagaaaacgagaaaaaggtttgctaaaaatgcaataaaataaatagagaggaaatagaaattgaaaagacatattaatagtccgtataaaatgaattggaaaatgtatggtttaattggtggaatatctgtattaataatgattattgcagttatatgtaatgacaatactgatagtcttatttcggatatagttaagaacttggcatttgggtgcgtggcatctacaattgttgcgctgctaattgaaattggaaatattaaagaacaaaacgataaagctactagtgtatatgatgcagtgtatatggatttaaaatttcaaataagctggtatgttgaaacttgggcacgtttgtgtagtgttgcttttaaagacgaagattatcgtcaggaaaaacatacttggattgaatggtatgagataacaaaaagcaaatttgcagaatgtgatgataacagacaagcggaattaatgcagttctttactgaacaactgatggatagcatagaggggattgaaaaatcccttaaacaaatagatagtcagcaatacattttaaatattaatgggatatatgatgagggattacgaaaaattcttggggattatagctttgaattttatgcggcaaaattaacattggggagagaatatgataaagctgatttttggaaatcctttgatgcaataaaacaggatttgataaactatatatataattgggtagatataagatattacaattattgtaggtttaagccatacaaatttcatgatgataaatcagaaacaatgcgtgcaatgttggaaagtgaaaataaataatgcagtaaagtgggatcaaattgctacacccttttcgttaaataatgcacacccccatcagtagtctgaacccccttaactgactacgatttgactactacacaaggcattgaattgctccgttttgcattattttgcaaaaagtgtagttataaacaagaaaaaagatgatgcccggaaaagccgataaaccaacgcaaaactcggcattacagggtatttcagaacaggagaattttatgattagagtactttttatctgtcacggcaggatttaccgggcatgatgaaaagtctcatat

SEQ ID NO: 3681 - DNA, 197 bp, Unknown
  gut microbiota DNA sequence
ttcttatgcctgccatttgaaagcattgcttttgctcgttcaatctgtttctctcgaatctctttttgataagcagcgtattttggtgagtaagtaattaacagacgctgttccatctttttggaactgtaaggttcttctttataaaaaagttcctctttatcatcgtctgtcaggctgttcagatcgaccgcttt

SEQ ID NO: 3682 - DNA, 720 bp, Unknown
  gut microbiota DNA sequence
gctttcagaccgtagatgatgttattttttacagtcatatgcgggaaaagggcgtagttctggaataccatggatacgccgcggtctccgcaggcaacattgttgactacctggcctcgcatatgcagggagccggaggtgatatcctccagaccggcgatcatgcgcagagtggtggattttccgcagccggacgggcccagcagaatcagccgctccccttcccggatttccatattcaaatcattgacgatcacattttttccgtatgcttttacgacgtgttcaaaaacgatattattcataagtcctcctgacagattaaccttttacgccggatgcggcaaaggtgttgatgatatagcgctggaaaataagatacagagccagcggaatgatcatggtgatgacggatacggccatggcaatggtaaattcggtgccgccctcagcgctgatgtacatctggagcgccagggaaagcgtgtagttttccttgctctttaagatgagcaccggccatacatactcgttccaggaattgataaagaaaatgatcccggtcgtgagaatggacgggcgtaccagcggcaggatgatatctcgcatgatcttgaggctaccgatgccttccatccgcgcagcctcaatgagggccttcgggattccgcgcatggcctggcgcagcaggaagatacctaaaacatccgcaaactgcgg

SEQ ID NO: 3683 - DNA, 803 bp, Unknown
  gut microbiota DNA sequence
gttttgaaatcatcaggtagtttggaatcatggtcacggtgaacggaataaacatggtactcagcatgataaagtagaaaaactgttttcctttgtaatcaaaatagacaaaggaataggcggcaaacaggctggtaatggttttgaaggtggtaacggatgccgcgatcagaaatgtatttaaagttatctggacaaatggcagtttttcaaatacatgccggtagttttccagagtcgggtgagacggaatgatctcaaaaatagtattaaatgcgtcctgcagagtcttgaaggagttggacagagcgaacacgatgggaaccagcatgaggaagacgatggcgcccaggatcatgtgccagccaatttccgaatgattgttagttttcatagtagactcccttctccacaaatttaaattccagaagtaaaaggacaatgaacagcagcatggtcagaatggaaatggccgatgaggtgccggtccgatacaaggtaaaggcctcgtggtaggaagcgtagatcaggttggaactggcgtagttcggtccgccctgggtaatgaccttgatgggggtgaacacatactgaagtccctggacaatggtggtgatgaacacgtaaattccggtagcggagctcattggcacaatgatgtccagaaagattttccacatgggaacctgatccagccgtgcagcctcaataacttcctgggatacgccggagacaccggctaaaatattgatgaagttgtagccgaaggtcttccaggtggtaatgatgcagagcacggcaat

SEQ ID NO: 3684 - DNA, 197 bp, Unknown
  gut microbiota DNA sequence
ccacaggagatcatcgaccagtatgatgcttctgacaaaaccttcctgaccgacaatttcctgccaaacgtcctggatctggcggtaaacagtgatggcgtacaggtcggaataccgtattctttaagcagcccggttctctacatcaaccgcgatctgctgaaggaagcaggactttccgaagagggaccgaagac

SEQ ID NO: 3685 - DNA, 787 bp, Unknown
  gut microbiota DNA sequence
ggtgtatcatactcatcaataatgatgaagaatggacgatatccatttcggcgaaatgatcgagttccagcttttgaaaatcggaaaacatacggccttgaaaaacagtacggtctttgatctgagttttatgaactttgcgaggtttgaactttaccttgcgtttcaaatcaacatttcttgccgtaagaatgccatcattgaggtaggagtaaagtgttctgactgacatatccagctctggatgaagacagacattccttgtacttgcgttctgcaaagacggcatcgtagcggtacttgtgtgcaatggaacaacgattgatagctttcgagcatccattacaaacgtaaggagccttatcaagacggttacactgttctttaacgaaatcggggcaggtttggttgcaggttggacaggaagtacacttaatgttgcagagtatgatttttctgcatacatttgtttttctgcagttgtatctgtgaatgcagaagttgcgagtgttaaggaaggatcctttatgataccaatcgcttactcgatggagtttcacttccttcgaaatggtagtaggatccttgcataagaaccgggcaatatctttaaaggagcagccattgttcagggaacgctcaatgtatttacggtctttaagggaaaggtgtttctggttaccaggaatatatttgctcatggagatctccttctactgctgtcagaaggtctccacgatcatagcatgaatgtatgaaagattaaactctactcatgcaggagtaa

SEQ ID NO: 3686 - DNA, 197 bp, Unknown
  gut microbiota DNA sequence
taaggagtcacaccatccattggttttaaaatgccataaaacgcagacaggattcttaaatgattttgcaaatactcaaactgctggatttcaaacacagatggtgccatatattgaaatgcaatcccttcatatgctaaaacagccggagtaagcctgttataaagatccatattttccaatctgttaaagttctg

SEQ ID NO: 3687 - DNA, 1687 bp, Unknown
  gut microbiota DNA sequence
gagatgattttatcgtggaagataccgataacagggagtttatcctgcggatcgaccgcagataaaaaagggggaaggaaaatggaagagaatacagcagttctggatactccggaagtggtaaaacatacaggcgcggagtggtaccgggatgtatccctggaagatgcagaggtatttatccggtccaacctgcagtcagccgtacgcagtgtgatcgcaacgggattttacctgaagcatatcagggacaatgaactgtatctggaagcaggatataagaacgtcaatgagtatgccatggacaggtttggtctcagtgcctctgccacatccaggtacatcaccaggaacacaaggttttccaggggcgggaacagtccgctcatagatgataggtttaaggacttcagtaagagccagctgcaggagatgcttggcatgagcgatgagcagctggagcaggtcacaccggatatgaccgtccgggagatccggagcatggcaagaccaaaggaagtcccttacatagagatacctgggcagacagagttaaaagatatccctggggttatgccggaagagagggcggaaagctttgaagcatcaacggcggagctgtttgatgtggaagaggatgaaaatatggtccagtcggtggcaggtaagcctattagccaggaaatatcgattacggaattggttgaagaggaagatgcggagattgcgacgtcgcaactgctcccggaagagactgctgccaatgagcagcggaatgaatctatagatgctgccgaaaagcagcaaatgggtcattgcttacaccgcccagaatatgagtgttctttgccagaaaaatatatgcaccggcccggaagtggaacagactgtgcccatgagtgctgctgggagtgtgccaaacatggggagtgcaagcttgaatgcaacagttcggctgatcgccctgagacagaggaagagattgcgacgtcgcaaacggataccgaagcttctgaaaatgaaatgaaagaacgtacagacatggaaatcctgagagaactgctggagagaaaaaagcagcttcttagcaaatgtctgagagctcccggcattgataagtcagatgagcatatcagaatgcaaaagctggaagtaggtgctttggcttccatgctgtgtgagctggaagatttggaagagaaaaaggatagaccgaagcagccagagcttccacagcttaaaaacaatgaccagagagcagcttttattgatgcgtatgagacctggacactctggatcgataaccaggagaccggtgagcggtattaccgatatgatcttccagatgggacaagcttcgttatcaagacgtatcactccatgctctatgactggaaagctgatgttgccatgaggtacaaggaagggtatggagcaaatgaggagtatcttctggagcctggaaagttctttagggattgccgggtaaacaggacagctttaattgaaaagctgaaagagatacagagaggggaaaagaaatgaactgtaaagactgcagctataaaaaattttatgatgggaacggaaggccagggcgttattactgctttcatgatgaagccaagttcgcacggggtgaatgcgagcctcatctgaataaaaaggagaagggcaatgatcataa

SEQ ID NO: 3688 - DNA, 659 bp, Unknown
  gut microbiota DNA sequence
ataaaagagggcttatggtgggagtgctccagccggtagtaccggaacccaagaacctggatgattatgagttcctgacattgaagaagatcctggctggatgtgagttcttccggattgtgctggaggaagaaaaaagagagacagagccagctgagaaggcaccggcagaagtagcaaagccgaaggctgtggaagagaagccaacagagacatctgtggaaaccaaggagaagccggagccaccaaagccagaagcaccaaacaaaaagcagattgatgttggaaaaatgaaagcgcttcgcaatgcaggatggagcatgaagcagatcgctgaggaaatgcagcttgcaccaagtacagtatgcgagcatttgaaaaaagatggaggaaggaaatgaaatgggattagcagatacgtttggcgcagaggacagagtgcaggtgaagttttcagatttttataaactgatgaaacaggctacgcagtatgaaatagccatgaatgcggtgggatgtgatgtgccgcatagatacatcagagaatgcatgacaggagtaaaagagccgcagaagcagggtatacagattgaactggaaaatccggcgaataagagcatgatgtcagccaagaaaggacaggtcaatggatagaacat

SEQ ID NO: 3689 - DNA, 366 bp, Unknown
  gut microbiota DNA sequence
ggagcccatgatagtaggaagcagtgtccagaataaggtatcaccgataccagctaaaggtcccattaagctgaccttgatattctgtacagcatccatggaagagattccctctttgtcttccagagccagagtagcgccaagaacgatatttgccagccatggcatggtgttgaagtatttataatggttgtttaatgcttcaacatattcgtcatcatctttataaatcttacgcagcagaggtccaataccgaaaacaacagccggagcaagctgggtatcgtagttaaaggttgttactgccattaaggaccagcggatggcacctttcacacagtctttttttgttaaaacgggagcttt

SEQ ID NO: 3690 - DNA, 232 bp, Unknown
  gut microbiota DNA sequence
cagatttctacgtatttcgatgcggcttcctttaagtattctggcgagtattccgtattaatactgaactttatccccgtgtattgaagctcaagattgatttcctgaaacagggaagtgatcttctcaaataagcggtatctggatttttcagtcgctttcttccatacccaggaatacttgtttgcgttggcttcaaacttagaaccgtcaatatataaatgttgcaggt

SEQ ID NO: 3691 - DNA, 1016 bp, Unknown
  gut microbiota DNA sequence
aagctttttggatccaacattgataagactttccattcagcttatcacaacatatgccatgcttacttttccatgcattccagtccttgctgttgtcaggcttttccgtccgaatgatcaaacaggaactttccggacactcttccataagatacaagagttccttcctctcttttttcacatcctccaccttataaatggcacatggtacaccaaagaatgaaatgctctgcagaaattctttcactccatccatgtcatcaaatacctgcacataatatgccgtattttctgctaatttccgtacttcatggtcaatacggtatggttccgttccatatacaattttcaccattttctccactcactttctcagtaattcgtactcaatgaagcgaagccgtgccctcattggttacactataatggctgcgcttcctgttccatgacagaatgtttaaaaaattcttcgacatttccatttaactttccatacagcatctgtaataatgggataagattccatgacaagaagccaatcccatatgtgatttccacgtatccatcgcaaaatccagtttcggaaggatatatcataatgaaaaaatcttcaaatgaaatcacaaaataatccagttccatgaaaatatccgtttcagaaagaagcggtgcattttctccttttatgagtacaatgacaaactctcgctcttctccataaaaatcgcatcggaattcatcaaatgctctgtaaaatgccgccttctgatccctggacaatatatgatccagatcctccaattcagcaacttccaataattcaaaccctaatgccttcataatggcatcaatcgttcttttcctctgtccatctgccactttcaatccctcagagcattcatcactgacaatacatagaagattttcaaccggtacatcctccattcttagttctgccgtctcatactcacaggttataatacctgctttgatcagccggtttactaaatggctga

SEQ ID NO: 3692 - DNA, 702 bp, Unknown
  gut microbiota DNA sequence
tatcagccggacatggcggttcgaagcagcatggcaaattataaaaaagaagactggcttattaatgttccattatatatgctcgctgagtatttaaagagcatggtgcatgtaaattaggctatgggagaaacaggctatcgtttggtggcctgtttttttattcaaacagattgagatattcatattccgcagcatgggaagagaaagaaatttctataattgatgttcgatagtcatgatttttgttcaaaagggcttttgaatcaggtaggtagtttacatatcatcatggatcgtatacagtgattatagagcagagaagaaggggagaagctttatgaaaagactaaccattttgtgtgcggctttgaccgcagcaatgtttatgaatatgtcagtatacgcaggaacttcagaagtggcagcagaagtcagtgccggtactgtatgtttaccgggagctgatttaacggatgtaatgggcggcggttttattttcagtgatcagcgtccagaaattacggatccggaatattacttaaaagaatggtacaattctccgcaagaaggggaacagagtattttaaatgcgcatggagaatataagacaccatacaacaattacatggatgaggcatatccacttttgcaggaatttcttcatagttttgactggatccatgcagatgaatataccag

SEQ ID NO: 3693 - DNA, 2985 bp, Unknown
  gut microbiota DNA sequence
aaacggcaatctctccatcggagaccagatgatcagactggctctgatgtggcgtccgatcgcagatgcctgtccatccggaaaatactgcgttggcatccgcccggaacatatagtcttaagcagccgtccaacggaaacttccatctgcggaaccgtaaaatacgtggaggactatggaaaccgctacggagtttatattgatgtaaagggtgaaaagagcgagctgattgccatctgcaacgactcggttccgcgcccgggcgaaaacattttcatcaatattgatttccgcaaactgcatctgtttgatgcccagagcgagaagtcccttggatatccagaagaaatccgccgtctgaacgcagccctggatttttccatgccggatgctcagaataaaaaccagaaagcaggaggtaaatatcatgaatcttttggtcagtaccaatgtgtataaaccgggtcagcttgcccgggtcatcccgcatttacatgccttccgtggtcagattggcgtcgagctgttccctatgtttgacgcagactgctatgaggaagagcttcttcattgcctgccggagtttgaaggaatcccagttagttttcatggcccgtactatgaaaccgagcacagcgcagcccccggcaccccggaatatgcgcactccatggacctgatccgccaaaccctgccttactgtgtgcgccttcaaagccagtatctggtctttcatcacaataacatcccggtgacggaagaacgccgggaagagatgatccgtgtttccagagaaaactacagggaaattgcggagctgttcaagccgcaccagatcccggtggtggtggagaatgccggtgtcctggaccgcggcaacatgctgtttgaccaggatgcgtttattcagctctgcagggaagaacattatccggtgctgatcgacattggccatgcttacgccaacggctgggacctggagcagaccatggaagcgttaaaggatcagatcgtggcttaccatcttcacaacaacgacggtgttcacgacagccatcagcggattttccacgggaccctggattttcccctgtttctgtctgattatcagagactgactccaaacgcagatctggttctggaatacagcccgaatgtggcagatgatgaatccggaatccaagaagacatttcctggcttctggagcagatccggaggtagcttatgctttccgaaaagaaactcttcttatttgatattgacggaaccgtggccttgggcgatgtcctgctgcccggagcggcggaattcttccaggaaattaaagagcgcggcgggcagtttgtattcattaccaataactccaccaaaagcattgcggactacatcaaaaaattccgtcagatgggtgtctcaaccgatcctcagaattttgtaactgcctccaccgcttctgccagctggctgcggcaacacgcagctggaaagactatctatacacttggaacacgatcactgattcgagagcttgaaggacatggaatccgcgtcaccacggatccggacacccaggatatttcctttgtgctggttgcctacgacagcgaacttacctacaagaagctgactgacacctgccgcatcctgcagacccgccctgtcaccttcctggccaccaacccggatctggtctgcccggtcccatttggctatgtacccgactgtggctccatatgtcagatgatcactaatgccacaggccaggtaccacattatatcggaaaaccttctaccgatatggtggatattgcactccgggaaaatccgttttccaaagaggaaaccgtgatagtgggtgacaggttttacactgacattgcatgcgggaacgcttctggggtagagacagtcctggtactaaccggtgaagcgaaaaaaacagatactatgattcatacgtactctccaacttatattttcgactccataaaagaagtaaagaaagcctggaagaattagtaatccaggctttctctacttctttaaaattttcaatgcggtatgtgtaatgattgtaaaagatgaaataacgcaacaatatagcattgcttacttataaaaaagtaaccgactcagaaacgagaacgattacttttttagatagtatgaatttaagtgcttcttcattctaatgcaaaaccgtaaagatagcaaggaaaagtggcatcatgatggatattgccatatttttgcttaataataccgcctcatattcgaaagagagtagtgtagacaaattatatgtatctattttcgccatatgcaactccgaaactcaattccattctcttctctcccgctattttcctgacctctcgaaaaaatatttctccactaggctcccctaatttgttcgctcgccgtcaggcgtttgccgccatcaggcggcgcactcaatggataaaaagaaaaataaatggaagggaaaatgaaaaacggcgctgctgcgccagcaatcaaggaatttatgcagccaattctctctcccatttaataaaaaagtcgagggagcaatggaaattggggaatatccgcttgcatatggcgaaaataaatacatatgattttctcagcattcatacacacctatatattttagtgtagaacattaccggccatataaaaaacagccaaaaacccgctgttgcatgatttccatatagcagcgggtttttggccgtaattctttgcaaaaaagcttcaatacatatcccagccgggcctatgaatattcctggcatccagtgataaattttagcgttttctcatcacattaatttgctttctccacagaaataatggttcctgtaaacgcatccacttcgctgagctctcccgtataggttaccgttacctcatctccttctttaacatctgataagccttccggtgcggtatcgaatgtcattgcataggtaccctt

SEQ ID NO: 3694 - DNA, 506 bp, Unknown
  gut microbiota DNA sequence
gacggaagcggaacggaaccatttttttcaaatacggaagagaaaagcgaagattttgtctggaagcatttggaaagaatgtttttggtgaaccttgctatgtcaaagattgtggctgtctatgaagaaggacagattgaatgcgggacattttgtgtgaatgaaaaaatggcccaaataggaccacagcttcataacgaccagaagctggatctttctctgggccggaaatcaaccgaagtttatcattatcaactggttgtggtaggcactggtgggaccggttcttattatctgaaggaattaggggcgatcctttcatccttaacgaaggaggaatgcaactcctatgaattgtccataatcgatggagaccgggtggagcagaagaaccttgaccgtcagaatttcctgaaagaggatgttggccagcataaggcaatggtactggcacaagctcttagagaccattatgggatcgaagtaagagcatatccaatgtacat

SEQ ID NO: 3695 - DNA, 4367 bp, Unknown
  gut microbiota DNA sequence
gaggtttacacaaactttaggatactcccagcctttttcttattttaccctggccttccacgcaacgtaaaggtcaaaccactcgcctttcactaaatttactcttaccgcagatagcttatcgaatttccaaaaagaagttcagcataatgcgttgttatgtcctttttaagatatattccaacaggcagtaattcgacataatattctatccatgatataatttaaataataacatatgaacgaaatacagtgagtatatctgcaattatgaaaattatcagttaacttctctgtattttaattatacaaggatttttcaaacgcaatttctgtctttttattcctataaatcttcgtggagttttatatccctattatctgccatacattgttttaaagcaacaatcattttttccgcatccaacggctttgcaagatgggcattcattcctgccagccgactgttaattatgtcttctgcaaaggcatttgcggacattgcaatgatcggaaccctcatggcatctcttcttttcatttccctgattatccttgccgcatccagtccattcatcctcggcatcataacatccatataaatcaccccgaaataatccagtgcggatttcccgaagatttcaactgcttcctgtccgtccgctgcacaggtaacctccataccactgtcttccagtatacatctggcaatttccatgttcagctcattgtcttccacaaccaatgcccgcataccttccactgaataatcctcaaggcttaccgaattgttttctggtgaattactgattttatcctgtactccaattttgaacggtatttttacaacaactgtagtaccaacaccaattttgctcttcagttcaattcttccatccatcctgtccacaagctgtttcgtaatcgctagccccagtccggtgccttcatatctggatctgcttgtctggctttcctgggagaacatatcaaaagcatgggcaataaaatcttcactcatacccacgccttgatctttgcaatagaaagtgaaaaatgctctgccatcatccagcgcttcttccttaacccagaccgtgatcacactacccacctgactgaattttatagcattgtccaaaatattcgatagaatcctgccaagatataccggatttccaaccagagcgatgtgactatatgtaccatttttccagtcaatctcatactgaatgcctttctttgcagcccgctcatcataaatttggttcaattccctcagtaccgttgtcagatcaaacaaaagctgataatcctttaaatctccgctctgaagtttattcatatccagcacatcatttaccagagacacaagatatttcagggattccattgccttttctctgatcttctgctgcatctgtggatcatctgcatactgatttcccatatttaccataccgataataccgttcaatggtgtacggatatcatgactcatggttgccagaaaccttgttttcatttcggcttccctctttgctgcttccgctgcaaagttaagattctcttcacgtctcttggaatcactgatactgcggaccgtacataagacatgggtcacatttccagattcatcccgtttttttacagtaaaaagcatccgatgccagctgccatcacacatcctgtattctgtagaaatacattcttccgtcttcaatcttgcggaaagtgtagaaacatccagaaacggacgtatcagcggacggtattccggtgcaaccattgtatcacaaagctgatacagtttctccaatgcacatcctctgtttcctgtcagtttgtgtatttcgctgtcatttgatacctcttcaaaaaaatctttctgcacatcaatcctgtagatagaacagtaactcttagcaattgccgaaattatttcattactcagccgtgtctcgtccagtgcctgccttaactgattctggatcgtagtttctttttccatgatatcatcaatatgtcggaaacccaccagtgcgaaaaaatgtttctcgtcctggtatattttgattgcctgcgcctcaaaaaattcatgctgattcggatttggtttgcttctgtaatggtaggtaatgcgctccctccgggaaagctgttccttcagatacctcgtcgaaatccagtctttaaattcttttctctctttttcatacagatactgaactgcatattggtcagcagcataattaaaattatcacactgtttcagattcattttttttgcattggttccgtcattcatatgcagaatctcaaagaaaccggtatttaattcaacataatagacagccgtaaaatctgcacatattttgtccaaaagccgtctttccgctatctgttcttccagcgtacttttcagttttctgttcctcatatgtaccattacagtcaggataagaagcagaacgatcagcacggctataaaaaccaaagcggctacagactgcatttgctttggaaatatgtatttagtttctgtcatagcaaaatcctctctctgtttcctgtctgctttttccatgcacctggaaggctcctgattgctgcggttgcctcataatcattcatgacaggcatttaaccttctcaactcctcgcttatagtcagcttaatttttttatcatccaacggctttgcaagatgtgcgttcattcctgcttccaagcatttttcggcatcttccctgaatgcatttgctgtcatagcaatgatagggattgtttttgcatcttgccgtttcagggctcttattgttcttgtagcagtaagaccatccatcacaggcatcataacatccatcaaaataacatcgtatgttcccggttcagaggctttaaagcactgaacagcttctaacccatttttcactgtttctacttcagccccattttccgtcagcatgaattctgctatttccgcattcagctcattatcttccaccagtaatacccggatgcctgctatatctgcatgaaaatcttctttttcttctggtcgtgcattcgtatcaattttaaatggaagtactacagtaaaacagctcccttcacccagcttactttcaacggttatggttccgcccatcttttctacaagttgtttcacaataggcattccaagacctgtaccactataatcagaacgtgcagaattgtccgcctgtacaaatggagtaaataattcattttttataaattcttctgacattccaattccattatctcttattttaaattcacatgtcatatgatcttctgatctctcgatcgttctcatactcatgtaaatagaaccattcaccttattgtacttcatactgtttgtaaacaaattcatcaatatttttttcaggtgaactgaattgctccagacatatataccgctgtaatcatcatgttcccctacaacatgaagtcctttttcttctgcctgaaaagataacgattccgtgatttcctgacatacctcatccagattgatggattcatcattaaaaaccactgtatctgattctaactttgccatatctaaaacatcatttaccaatgataataacagtttcgaagactcctttattttatgcaggcaatcttttgcccgctcaccatcatttccgcttttttcaagaatcataagcataccaataatgccattgatcggtgtcctgatgtcatgagacatgttatttaaaaaggaagtcttagccttattggcactctgtgcttctacaagtgcattttgtaattcctgccgtttttcttccagttcctgattcagttttaatgcctgttcagcagatttcttgaatctttcctccgcacgttttgacttcttccaagaacgaagaatgatacacagaacaacgaaaaaagaaattccaacgataagtgaaactgtcagtaaattatcctgaataaaatccctcactgtaacttttcgtgaggaagcattatacgaaactactgcacccgaaaattgagctgtaggcatagatgtcagtgttttattcagaatggacaaaagaaccggttctccctgccgaacagcaaatggaacatcggcttcttttgtcaggaaaacactatgaagcttattatttttcaaatagtcagaaacagtacctgaactgcttacaatgcaatctgcctcccctttctgcatcgcttttactgctgcatctgatgtcccatattctataatctcccattttggataattgtatgaaagatatgccttcaatgaaaaattatctttttcaacggcaactgtattctctttattttcatcaaaagaatccttt

SEQ ID NO: 3696 - DNA, 380 bp, Unknown
  gut microbiota DNA sequence
tctatttttccatcctgcaatgcctgaagcagttcacttcttgtatcatacccctttaattcaaattccagagtctgaccttgcagacaattttctgcaagatccacataatctgtgataacacctgtcaatttgcctgttgatggatctacactactgatacctccatcctgattcagataccctatcctgattgctccatgctgcccgatccactccctttcttcttttgaaagaaacgagctgctctgtgcagaaagataacgcctgtagagatcatcagtgtaaaatgggttgtcatccttgattctgcgcatagcactatccaatgcttctttgatatccggacgttctggatttatagcgaaatagatttctgt

SEQ ID NO: 3697 - DNA, 105738 bp, Unknown
  gut microbiota DNA sequence
attgtcatccttgattctgcgcatagcactatccagtgcttctttgatatccggacgttctggatttatagcgaaatagatttctgtctctccaatacttgtaatcggtgaaatatccgattcttcccaacgggattcttctaccgaaacaaagcagtcaatttcgtgtttcgacagtttgtccataacttctgcggtattagaaacattgacatgctgcgtatgcagaccatactttaactcccattcgttaagcacatcctccgttatattatctttaagcacaccaatattttttccctcaaaagaatccaaatttcctgctgtaagatccatattggatgcatccgtatagatgtaatatttctcttcccccataggcatatcggaaaaaagcatattttcagcacgttcgtctgtataggaaatgtcaccaagaatatcaatttctccattttccaactgtgtaaagcagtttttccaatcacttgttatgtatttatatgtccatcctgcataacctgcaatatcttgaagatactcataaccatagccgcttctttctccattttcattgactacattataagtttcctcaaaagatcctacccggataacattgtcagagttttctttggcagatgcaggaacggataaaacaataaaacatataattgtgcaaaatataaagtagcaaaatttaaaattccttatattctgtactaatttgcacttcttcatctttctcccaccctccaggctacagtcgcttgcttgttaaattccccatcatctataatgagtattttttgtcttttatccatatttttaatttcctttatatatgcggtttttatgattttgccagcagttttatgattgcgctttttaataacggaatatcaatcggctttccgatatgttcatccatcccagcatccagacaagcttttcggtcttcctcaaaagcatttgccgtcatggcaatgatcgggatctttttggcatcttcacgttccaactcacggattgcttttgttgcttccagtccatccatgaccggcatcatcacatccatgatgataaaatcatactcacccgtcttagaatttcggaatatttcaagtgcttcttttccgttttttgcttcagcaatatccaggtgctcttcttccagtattgcatgggcaatctccatattgatggcattatcttcaacaagaagcacacgctttcctgacagattcatgctcagtggacaattatccttctgcggatcattcttttcagccagatgctctatctcaaatggaaccgtaaacgtaaacgtgcttccaatattttcttcgctttccagttctattgttccacccatcagttcaactatatctctcacgattgaaagccccagaccggagccactgaatgtcgtagttgaccgtttgccttcctgcgcaaaagcatcaaacgcatgtttttgaaattcctcactcattccaaggccggtatctgaacatacaaactgaaaaaccgccgtatccccatcatccgataattcttcgcaatgaacattcactgttccatgaaaataattgtatttaatcgcattagaagaaagattcattaaaatcctgctcagatgtaccggacttccaatcaaatgtctgtggcggattgtgcttgcgtccacgccgccttcaaatcttacaccattctcataagcactcattgcaacaaccgtcagattattacttaacagttctgccagatcaaaggatttatgttccaacacaagggagccggattccagtttgctgatatccaggacattgttgatcagattttgcagataatctgtggactgaagtatcttctgcctgcattcctgtaacttgaccacatcattgttatgtttttcagcgatatggatcatccccacgattccgtttagcggtgtacggatatcgtggctcatacgctggagaaaggctgtttttgaaagattcgcacgatgagcatcttccatgcttgccttaagccgtttctgatacataagttcccgtgatttttcttccgtaatatcccgagcgacataaagcacatccacagcgtttccatgcgcatctctgctctttacaataaatctggacagcctccattctccatttgctcccataaattcaattgaaacagaattcgtattccggagtctctcggtcaatgtatcaaattcaagaaactttcggtacctttctctctcttcaagaccagcaaatgccgttggaagctgttccataacatcatcaatttttcccttttgaccaagtatttttcgcacaaagtcatagccctccagaagctcatatgtccgctccttaatattggcatacacaatcgttacatacaatgtggcaattgcagaaataatctctgtcctctttgttgcctcatcaaaagcctttttcaactgtaccgtacttttcagattttccctcacacatccaagatgcccaccgacatcagacagcagcgtgatggaaatttcattctgactcaaatcaggattatccactccgatgaatccattcatttgatgattagcgtaaatcggcactgcaatcaaggaacatatttcctgtgtttttaataattcatattcctccggctcagaacattttgttgcttccagatcatggatcacaattgtttccttgttttcaaagcgtttcatccagcttggcatcaaactgactgggattgcctgaagattatctatctctggtatcactccatcggcacaccattcaaatgtattactcagactgtccttctgatcggtttcccagtcaaaaacatatactcggtctgcccctgtatagtttccaattgcctgcagcaaagagtgaatgatttctgacaactcctgctcattttccacctgatccataagcgaaatctgatgcagaatcgtatccatgctatgtaattttattttataaagttcctgaatatcttttgttttcatttcccatccccctacattcccaagtattccactaattcatgaaatacctctgctaatatttttatctgctccatttttatattttagcagccaccaattattacttgcctgttttagtttctttttgatctccaaaaatgaaaaaagcattgtcattgcaaacaatgcatctttaacgtggcaactggctaccattttacaggccctatagctttgcgtcccagactttcatctggtttgccgatttccttattataacttttaaacgtatgcaaaaaactgattttattatactctaatgctctactgtatacaagaaaaaccttaccgctttaacgctagaaataaaaaaagaacagccgatatatacattcgaactattctcctacttccgaagtccatgtagcattgacattactgtttcctgctcatttgtactcaaatcgttccatatccttaaaacttctttctaatcttctgtcaggttctctgaattaccttcctgaaaaaagtttgtcatataaaaatttttaacgtcaaacaaaaaattggaagccacagtgttatccatgacctcacttttctcgcagtaattgacatacaccatcggctccatatctttcggaagttccggttcataggctttcactctttccatcaatacacctgcacgaacagacagttcgcatttttcgtctacaatatccttcaagcaagaaacataataatgaatattaccgctttataaatccagcattacttactatcatcacaagaaaaagccgctgatctatattcgcacacaacaccgacctcaagaacaggctgaccgcctatgccgcagcgcaccccggcgagtgccgccagaccgacgcagacccggacacgggctgcatggagtttgaaattcgcaaggggcggttctcctttcggccgaccgccccatacagcgcagaacgccgctgggcgcgatctcccataatatttcccactgggaacttgtgatatcgttgccgattttatctgcccgctaaaatttctatgcagttttgcttttacatcttttaatttaagcagttttactctattaccctcgaaatctactgttatattgccattcgtaaaatttgttgtatatgacttatgattatcatgtttgcccttaaatttcggataacctgcatgttccttgttcccatgccacaagtatataacaattttccacttttggctaccttaacccaccgtctaaagccagtggaattgcggtagccttactttcaaaaaatgcaagtgccagctcacagaacctgtcaccggcagcatttttccatacatgacagaaaaaatatgggcaccagatccggtcaatcacagatctggtgcccagccaaaaatattttatgctttagaatattatgagtcagtaattacttcttagcaatgtactttctgatatccagtgcgatcgcaactacgataacgataccctgtgcaatgtactggtagtttgtatcaacacccagatactgtaagcaggtctttaagatctcgaataccagaacgccgatgagaacgccggagatacgtccgataccaccgtttacagatacaccgccgatggtgcaggctgcgattgcttccagctcccagccgtaacccatatttacagaggaaccaccggatttagcacctaccaggaaaccgcccagtgcgtagcatgctgctgctgtgatatagatgatgatcttggttttctttgtatttacgccggaaacttctgctgcctgctcatttccaccgatagcgtacatatatttgccgtgaggcatcttgttatatacaaaccacattacaataccaactgctaaagcgatcaggaacagataagggataaaaccaaataactgtccttttgcaacctctgtgtaagcagcacgataaccaccaataggagttgcgttggtataaaccaggcagacaccgtatacgattagctgcatacctaaggttccgatgaatgcaggaacctgcagataagaaactacgataccgttgatagcaccaaagatagcacatacagctacacagataagcagtacagctgctacccaccatacaccataaaatggcatattagggaaaaacttgccgctgtaatcagctttctgaagcaatgtacctgccaggcaggcagataaacctaccatacgtcctgcagaaaggtcagtacctttggtgatcagacacccggatacgccgcaggcgatgatgaaacgtggtgctacgttaagtgcaatattttttaagttggagccggatacgaatgtcggctgcatgataccggtgtaaatagctaataacaccagaacgactataattccgttattaataaggaaatcctttaaattaaattttttcgctgtcatggcttaatcctcctacttggactctgtggttgattttccctgaagatcaaactgtgtcgcaaaggacataattctctcctgggttgcttcttccccttctacttcgccggtgatatgtccgttacacattacaatgatacggttggacataccgatcagctccggcatttcagaagagatcatgataatggacttgccctgttttaccaggtcgatcatgatctgatagatctcatacttggcacctacgtcaatacctcttgtaggctcatccatgatcaggatatccgggttgtttgccagccagcgggcgatgataaccttctgctgattaccaccggaaagagactggatcagtgtctttccactaggagtcttgatgttcagcttctggatgctgtcttttacaactgcatctactttcttctgatcgatcacaccgctgtttgtataattcttataagaggcaatagcggtgttatcattgatactcaggcagcctaaaataccagttccacgacgatcctctgtgatcataccaatggaattatcaatggcatcttccggtttcttgatattaaccttcttgccaaggacttctactgtaccgctggcaatatgtctcatgccgaagattgcttccatcatctctgttctctgtgcgcctaccagaccgccgaatccaaggatctcgcctctctttaactcaaaggaacaatcctggaaggaacgttcatgaatgctgcacaggtgctctaccttcagaatcgtctcatctgttctgtaatcttcctttggaggatatacattggtcagctcacgtccaaccatctgttttacgatctcatcatcggaaatatcctttacttcccaggatcctacatatgtaccatctcgcataatagtaatatcgtctgcgatctgacggatctcagccatcttatggctgatatatatcatagaaacgcctctggactttaagtccctgataatgcggaacagcgcttctacttcattatcagtcagagaggatgtaggctcatccaggatcacgatctttgcgtgctggctgactgcctttgcgatctctactgactgcatctgtccaattgacaatgttcccagttttgccttaggatcaaaattcatttttacatcttttaaccatttctcagcttcactgttcatggtcttgtgatccaccattttaagaggaccaacactcttcatgggatatcttcccagatacatattttctgcaatggaacgatccggtattggctgaagttcctgatgaaccatcgccaggcccttgcgaagggcatcatccggatttgttatctccgttttttcaccatcaataatgatctgtccttcatccatcttataaatgccgaaaagacatttcataagggtggattttccggcgccgttttcccccatcagcgcatggacagttccgggacgtactttcaagtttatcccatccagtgcctttacgccagggaagcttttactgactcctatcatttccagtctgtactgctctgccatcccgttactcctttcaattcctgtgacgctttttctatgccctccgggagcatattttccttaaaaatcgggtgtgacggaatgacccgcacacccgataaatagtcagttaactgtaacttattttaacttgtcaaggatttcctgtgcatttgcgttagtaaccttgatgtagtctacagggatctttgcatcaacttcttcgccgctgatgaactgaacagctgcgtctgctgctgccttagcctgtgagaagtgatcgttaaatacagtaccggtctgcttgccatcaataacgttctgaactgcctcggtcagagcatctacacctactaagtagatatcttcatttaccttacgtccagctgcttcgattgcctgtaaagcgcccagtgccattgcgtcgttgttgcagaagataacttcgatcttgtcgccgtactggtttaaagcatcctgtgcgatctgctgagccttagcctgatcccagtcaccacgctgctttaacagttcttctacttctacgccagcgtctgttaatgccttaacggagaattcagttctgtactgggcatctacgttctcagggtcgccctggatcatgatgtaggaaacttttccatcaccattgatatcgcccttggtctctgtctctaagatctcttcgccctgataggtaccggactgtcttgcatcacagcctacataagtagcgttgatcttttcgtcaacccatctctgctcttctgcctcatctggctcacggttgatgtaaacaacaggaattcctgcttctttacacatatctgtgatctccggtgcggaagaagcctgtaccaggttcaggatcagaacatcatacttctgggtaatgaagttgttgatctggttggtctgctctgcctgatcgcccttaccatcctggataactacgttctctggcttaaatcctaaatcttcggtcagataacgctgcagttcctgtctgtacagagtcataaagttatcatcgaatttataaatgctgatgcccactttcttatcagcaacatctgctgttccagctgcatttgctgcagtctctgctgcttccttagctgcctctgtagctgcttcgcttgctgctgcagtttccttagctgcttcagtaggagctgctgttgtagcggtgtttccgccgccgcaggctgccagtgaaagtgccattgcggatgccatagctgctgctgtaactttcttaactaatctcataattgtaatcctccctatacatatgattttgtttttttatcgcttttggtgttttttccttaacgacaagcacattataaatccgcgttgtgcatttttctataagattttttaaggagtattatgaaatttctttgattttacattattgctgaaaaaaattattatttttatgtcatttattgtcagttcctgcaatatccgcctgggtcagtcctttctggctgcaccagaaatattttccgttttccagttttatgctctcatcaatgggaagtccccggcttaaagaggctgcgatcccgaaaatagcgtttgcatagccttctttatccgcttctacagttccaaaaagctttcctgccttcagcgcttccacaccgggaggcgttgcatcgatacctgctaatttgatcgttccgggaaggatccccgcccgctcaatggcatcgatcgcgcctaaggccatatcatcattattgcagatgaccagttcgatctggtccggatagtcggtaagccactgttccatcatggcagatgcctggctgcgttcccagctggcaatgccgcctgtgattttttccagaggaactcccccgtcttttaatgtctggatagaccattctgtacggatcagggagtcctggtgattgctttccccttctaaaagtacatagctgacggttccatccccgttccggtccaggcttgcaggatccttcctgtaggcatctaccaggatctttccttccagaacagcagactcttttgcgtctgcccctacataataaagcttctcccaccggttcatatcctcttccactggttccctgttaaaaaagatcacaggcacatctgctgccatggctttatcaatgacaacagaagctgcaaagcgatctacgatattcacacacaaggcattgcatcctaactccagcagccggtccacctggttgttctgggtattctggttgctttttgcatccaaaatatccagtgtcaccttgatcccctctgtccgttcatattctttcgccttttcttcgatataagaacgcagggtgctgataaaggtatcatcccccctgtaaagaagaagtcccacacgtatttccttggacgccgcctctttttttgctccgtttcctgccaggataaacaccgcgataattacgatgatcgcaaacataccaaaaagcattactccggttccttttgttttcttcatcctttttaccccctattccattggatagagcattttctcatatgcaccggaagccagttcctgctgatccagatagaccggatctaataaagtctcctgcttttgtctgcttccatgaatggcttccactgctttttttatgcttaaatatccctggctgaactggtcataggtcacaagtccgtcaataataccctgatccaggagatttaagatccccgtagtagaaccaatgccataaagggcagatacatgatccttgtaaacagagctttcatttaagatagaagctgtccggtccaaagactgcacatccaaagccaccacttctaccggaccggtccccggatagactgtattttcgatcaccttgcgaaaagcctttccttctttatctacatataactcataagagatcccctggtcatttaaaacagagcagaccccttcgtaggcgtcctgtacgccgttataagccattccctgggcaaacaaacacactttttcacctggaaggttcttttctgctgctttttctcccaatattcttccggcttcaaaataatcaatgagaatagagtctgtcacaaaatcactgggggaagacgcgcttacaaaaatcaccgggcatcctggatttaaactttctaacgccataaccgccgccttttcctctgccggttcgatcaccacagcacctgccccgtcccggatctccctggtggtcagttccacctgctgatcctgatcttttcggtcataaagagtgatcagccttacatcacttcgcagatccgtagctgccttttccattccttttctgaaattctgataataatcgtccgtgtcttcgcttaagatcacagaaatggagtcgatctgtacagcccgttcttttatgatcagatctgtagaagacatcagaaacagaaggaccagaaacacagcccctgcgcataaaagcattttttctcttctaggcatgtttctcctccttctttgcattttgctcttttaatgcttcttcttttgctatttcttcatatgaaacagccggcagatgcatcagcactgtcgttccttcatccggttctgaatttatggaaataccatagtcttttccaaaatacagatggatcctctcatttacgttctttacgccaatgccggaaccccgcctggaagggacatggctggtatctgtaaacaggcgctctacctgttcttcggtcatgccaagtccattgtcctctacgcttaaatacagatcgttgttctctttccatgcccgtattttgatctcgccgtcaccatccataaattccattccatgataaatagcattttccaccataggctgtaaaataagcttcagactggcaagtcctaatacctcgtcctctgcctcaatagaataagagaatttatttttataacgcatatgctggatcatcaggtagtttcgcacatgctccaattcgtcccgcaccgggataatactttttcccttacttaaactgatgcggaagaaacgtgccagcgccgttactgctttcaccgcctctgactgcttttcattttcgatcatccatacgatgatatccagtgtattgtagaggaaatggggattgatctgggactgtaacgtatcaaactcgctttttcgcttggactcatgttctgccacaatatcatccataagacgtttgatctgccttgccatgttctggatggattttcccaaatgctggatctcgtaggatccacctgtataaacttctgtttccagatttccttcctcgatctgattgacagatttttccagttccttaatggggtctgtaatacgggaagaaatataggagttgatgatggtcagaataaacaacaccagtgcaataatgaacacgatcaaaatacgtgtcttaatagcgtttaaagatactgtgtcaagaggcatgacacctacgatcttccagcctgtataacctactgtttttatagatactacccgggtctgtccctgccattgctcctgataatttccatcccttaaaatggctgtgttatcattattttccattgcaaggccggagctgatcagctggccgttcgggtgatagatcaggtccccgttgctgtctgtaagataaacatagcctccttttgccaggttcattccgtcaaacagctgttccagactgttatagcgcagatcaatgagcaaaacgccctgatctgtataaggaccgtctgtgatctctactgctcttgccacagataccacccaacgatactggctgtctcctgtatcaaaaatatgctgtacatgaggcatggaaaaatgaagattttctgttttttccaatgccgccgtaaaccagtcctgatctgccacctgggcattgttttttaatcttgctgcaggaacagactcaagcagttctccttctttggaaaacagggcgatattttctacattatctttattattatcataaagaagggtgatctccccgttaatagaaccatctgaaagatcggcatttttgatcacgccgtaatacagggagtctgaaagtttcattaccagacgcaggtaggagtccatggtccggcctaactgattgataagaatgtgattttcctcctgaagggcagaggacatctgccctgacagccgtccgtaaagggaaactccgataaaaacgctggctgccagagcagtaatggtgaaatacataaagataatagaacggatactggcattttgaagccggtgttttcgctgtttcaaaaacattattttgctcctctgaattttgtaggtgagataccaaaacgtttcttaaacacgtagctgaaataattctgctcctgatatcctacttttgccgcgatcacataggtcttgtcatccgttttatttaaaagttccacagctttgtctaaccgcacttccgtcagataagccacataggtctttcctgtttctttcttaaacatggtggagaaataagccgggctcatatgcaggtgacggcagatcttctccacagacagatccgcatcctgataattgtccataatatactgtctggcttcctggatcacctgttttgtggtattatcacgctctgtatttacagactggtttactgctgtggccgcctggagaagccattttacaaaatcttcctttttctgggtgctggagatcaggacaaaggcctcatttaagtcagactctccctggaaaatggtctccatatccagatcatacatctgcaccagctggatcatacagtttaacacacttaacatataggtctggcactgacgctgatggacttttgcatcactgatcttgtcggcaattttatgtactacttcctcgatcttttcctgagggccgaattttacagcacctaccagttctgcctcgtctttgctgtcaaactgcagctttcctctgcttaccggctctacatcattaatgtaaatggtatttccggctcctacgattgccttatagcccaaggcatttaccgcatctttataagactcacagatcatgcccaagtcctgggtgctgtgaccgataccaatagtgatgggcactgcaaggatctttctggtttctttgcagatatcacttaatacagcagtcagaccggtctgggtattttcctcatcaatcgctgcgatcacaccgatctgggcatcgctgctgccagtggaattaaaagttgaaaaacggcagtattttcccagcttttcctctaagatctgcataacagaaatagggatcaggtcctgttcacggtggatcgccagttccccttcgccctcttcttccggccggtcaatgcctaccgctgatgcgatccatttctgtgcacctgaaagaggaatgccgtattcttttaaacgtgtttcaacggtctcagaagcaaccggggcatttaccagctcatttaaaaactgttcacgaaggatcggcaggcttttaatataattttcccgcagcaggtttacatttcgcttctgctcgatctcctgatccagatttgccttgatcttctgcaaaatagcagtgagctcttctacgttcaccggctttaatatgtactcagttacatttaatttaatagcctgcttcgcatactcaaagtcatcgtaaccggagaaaataacgatcttcatagacgggtatttctggcgcacacgctctgccagtgtcagtccgtccatataaggcatgcggatgtcggttaagatcaggtcaggctctaaagcttcaatcttttctaaggcatcttccccgttttccgcatcccctgctactaaaaatccattttcctcccatttgatcttgcggataatgctctttcttacctcttcctcatcatctacaaggataatacgatatagtttcatgtattttgtcccctttttattttatcccatatagcaaagcgttgcagattgccgctgctacgttgcttccaccttttcttccttctgccacgatgtaaggcgtgtctttcaatgaaaggatcagttctttggactggatcacattcacaaagcctaccggcgcaccgatgatcagggccggttttatttttctctcctggatcagctcatacaggcggatcagggccgttggggcatttccaatggcaaagatacagggtcttgttccgtctccaaacagattggctgccttatccatacttgcaaccgctcttgtgctgccgtttttctttgcctctgctgccacatcttcatctgccataaagcataaagcttctcctccgtagctttccagccgctttttatttacgccggaccagcccattttcgtatcagtaatgatcactgctccatttttaatggcttctcttgccttttctacaacattttcggaaaatttcagatgatctgcataatcaaaatccgctgttgtgtggatagcacgcatgatcaccggtgccagttccgggtccagttcctttcccattgcttttaattcttccccgatgatctcaaagcttctgtgttctatatccgccggaagcacctgttctatatgcaccttctcttccagccccatgatctcatatatcttttccatatccagactctcccgcagtatttctgccagtttatcatactgttcttctttatatgccttataatccatctgccctgccatttccagggtaatgccctttctggctgccagggcagttgctatggtctcgcagatgccgggggcatcaaatacaccgtggacataggaaccatacaggtttttccggttccagccacaggggatacccctggcttctctgccatttgcactttctcctgcatttaacaggcacagtggctgttctttttcacggctctttgtacggcccatatggatctcataaccggttaatttctttccggaaagttccctgaaacagccgtaaagttccccgaatcggccttctgtctgggtgcgtactttttcttcttcaaattctgtttctaccgggaagaggcccattccatggatctttcctttatgggatgactcaatggcatgttcgtccaccagccattctcccatcatctggaaaccgccacaaattccccatacagggacctgtcttgctgccagttttaaaatagctgcttccaggccaatctggcgcatccacaataaatcatcaatggtatttttcgttcccggaaggatcaccatgtctggcgtttttaattcagaaggctttgagacataacggatggagacctcatccatacgctcaaatacatccatatctgtaaagttggaaatttttggaaaacggatcaccgcaatgtcgatgcagcccttctgtcttgtatttcccagtttgctgcttaagctgtcctcatcttcgatatctacattcatataggggacaacgcctgccaccggtatcttacaaagatcttctaactggcgaagtcccggctccaggatcgacttatctccccggaatttattaataataagcccttttatgcggttccgctcttcaggctctaaaagttctactgtgccgtaaagctgggcgaacacaccgccccggtcaatatccccggcaaggagcaccggcgcatctaccatggcagccagtcccatgtttacaatgtcatcggattttaagttgatctctgccggacttcctgcgccttcaatgacgatcacgtcataggcttcgtccagacgtttgtatgcttccatgatctgtgggatcagctgctttttgtaggcaaaatagtcttttgcccgcatatttccgatggaaacaccgtttacgatcacctgggaacccacatcggtagtgggtttgagcaaaatagggttcatatccgcagaaggctttactcctgccgcctctgcctgaaccacctgtgcccggcccatttccaggccgtcttctgtaataaaggagttaagagccatgttctgggatttaaaaggcgctgttttatagccgtcctgggcgaaaatgcggcacaggcccgctgcgatcagactttttcctgcattggacatggttccctgtatcataatggatcttgccatggttttattcctccttttcaggtctgtggggtgcttgtgttggattggcatccgtatatacggtatctgtatgttttgtatctgtacattttatatctgtacgtttggtgactgtacattgggaaagtttgtgtaagaactctctgttttcttcttctgtttttacgcagatgcggtagcaggatgcgtccaggcccggataattggagcagctgcggatgaggacgccctgttttagcatgcggtcgtacaggctgtctgttgctccttccagagtcttttccataaagaaaatataattggcctgggacggatagacgatatagcccagttctgttaatgccgcctccattttttctctctgctcatggatcagttttctggtttttaatacatattccgtctcttttaaggctgcaatgcctgctctctgggccagtcctgaaacagaccagggctgtcttacctgacagatctttgttaaaacgtcttcattgctacacagagcataacctaaacgcaggcctgccatggcatagatcttggtaaatgcctttaaaacaaagacatgggagagcttctctaaaaacggaataatgctgtaagcttccggttcatctaaaaactcttcaaaacactcatccacaaccagaaaggtatttgttttttcgcaggtttcagccagttttaagacctgctctttttttacggcaatgccggttgggttgttggggttgcacaggaataaaatgttgtagccgttgttggcttctgatgtagatttctgttggtcagaacaaccgactgcggtagtattataagtggcattagcccgttccagcgttttacacagttcctccacatccagacgatagccattttcctctttgagataaaaaagatcaatatcacagtccactgccttcaatgcctgctcatattccaggaaagaaggagctaaaagcagtgcttttttcggctttaaggcaaatgcaagtccaaagatcagatccgctgccccatcaccgcagaggatccagtcctgagtcaccttatggtagtcagctaatgcctttaccagatccctgcactggctgtccgggtaaacgcagcagactggctcttctatacaacgggccagctcttcttttactccctgaggcagtcctaaaggattgatattggcggaatagtctatagaaactttattgctgtaaatgtcaccgccgtgttgatatttggtatgcatatgaattccttctttccaaaatgaatatctatactctgttcatctcccagcccggctggggatgatcttgaaccagttatttgaatatctgtatttgtatttccgtgattatcacctatcacctgactgctgccaggatcattaacagcaccaccatcagtatcccctctgccaggaacattaaaagagaggctttccagatatcctccgggacgatctccctgtcattatccccgataaactgctttttgtgaagaaccccaaaataccaggcatccccggcaagacgtaaatgaagggctccggcacaggcggcttctccgtgggctgagttggggctggcatgtttacgccggtctcttaaaaatatgcgccaggcattttttccgtctgcccccggaagcaggtatgctgccagtgtcagcagacagccggaaatgcgggccgggataaaatttaacacatcatccagctttgcagctgtccgaccaaataaaatgtatttatcattggtatagccgatcatggagtccatggtattcactgccttgtaaaaagtgccgcctaccggtccgaaaatggccataaacaggaacggggcgatcacaccatctgaggtattttctgccactgtctccaccgccgctctggtgatacctgctgtgtccagaacactggtatcacggcctacgatcatggaaactgcctttctggctccttctgtatctccctttttcagttctttgcataccttcatactctccacacaaaggctttttgcagccagaagctgataacagaaaaagctttccagaataaatcttgcagtgaggccaagatatcttcccgttatatgaaagagcagaccaggcataatgagccagaaaagacacatgatcagggtaagacaggttcctgcaaaccgtggcttttcaggaaaaagttttcgcagtctcttctccagtccgcttatcatatttcccatcaggcgtatcatatggggaaaatgatagggatccccaaagatccagtccagaatactgcctgttaaaagggccagcccatgaagctgccacaattgtatccattccatgttactatcctttcgtttctcttataccatttggcgttattactgttcatgcattgcgcgaccagcaatggaatttgccgtggtttcacattgaaatacagcaaattgcacctttttctccctactttaaccgcgttccaatcccacagcagacccgccagatttcctctgacttttctgccagcagacagcagatgcggcctgtttcttccctgtattcccgttcaaagggatccattgggacaataccgtaaccgatctcatctgtaactaaaatgcggtccgggttggcgttataaatggtttctgccagatttttccagttgtgaagacctgcagatgttgtttcaaataaagctgtttcctgctcatccggcaatcccaatgtctcatctttttttaaaatccggcgtaccagcaggtgaaaattccggcaccaggtggaagtaaggaattcttcccaggtggatatttccccatctgcccagtgatctgcctttggatctttctgatgatcttccagacatgtttcctgagtttttcctttttcctgtactctattttcaaaatgttcttttgcaaaggaagactttccctgacatcttcctccaatgaccatgatcatgcgatttttctccttcggttctcctatgcttatgaaccctgttttcaacttatttttacaagttcagatattttcacattattctcaataaaaatgccactaccgtcagacatatcagttcctctgcctgcaggaaaaatccagccaggtctccggtaatacctccgaaattctttttggaccatttatcataccaggcaaaaagcactccctgaagcaccaggcagactccataaacttccagtccctgtacgccccagatgtaaaaagccagtactgcaaggatcaccagtgacaggatcaatatcttcttatccagctttttctcagaagcctgggaaaaggcagctgccagcccattgtttttcgctgacggaaacatgaccacggaaaggccgctgaacacccgctcactgaatagaaacagcaccgggtaaaacatggcctttccccgggcattttcacaaaattcatacatgcttcctgtatataataacagatatacaaccgcacagatcactgcaaaggcccctaaatggggatcttttagtatttccaactttttcgttctgtctccataggaatggaccgcatccatagtgtccataaaaccgtccatatggatgccccctgttacaagaaaggggatggccgacgcccaaagaaatcttatccccacagacagattaaactgcgctgcaataaagagccaaagccctaaaaggcatccttctataacacctaccagcggaaaaaagcacatggcatggctcattttttccttggtccactctacctggggtacaggaatctttgaatacatggaaattgcgatcagacaggactccaaccatttcataattacacttctgctccttttttcataaccggtataccgtatactacttcaactacctctgaagccattttcgccagacggcagttaacaagacctaaaaggcggatatactctaaggtttctttttcatacatttccccatcagagcctacttcattggtgatcactgcgaaaaaatcagctgcttcgtcaattttggcaatgtcagcgcagatcttttccgccagcgcttctgtgcgtctgccaggttctaattctgctccaaaagaactgccaaacatttcattggctgtgagattggaaacacattccagcaacactgtcagtttgccatttccagttttttccagtttttccacccgtcccacatctttcggactctcaatggtaataaatccttttccctggcgaagcattttgtgccgctctacctttttcctgccttcttccccgaatacttccatggtagcaatataataccgggtcatttctcctgcttccagtattcttttttctccataggcagatttaccgctgccgcttcccccggtgatcagtatcatagctattctttatcctcgtttttatcttcttcaaaatgacagtaaggctttacctgtatatcctgaaaggtatccattttgctgtaaatagtaagggccatatcaagcatagggaaaaacgcagctgctcccgttccttctcccaggcacattcccgcctgaatggctgcttttaagccaagactggctaaaactgcctgtcctgccggttccgcggacacatgggatgccagaagatagtcagccacagccggacaaagcttcactgccgccagagctgctgccccggtaataaggccgtctaaaaccaccgggatccgccagtaggcacagccaagataaaaacctgtcagtgccgccagatccaggccgcctacttttgataaaacatcgatcccgtcagaaggatccggtctgtggatacggattccctctttgatcacttctattttacgcttaagacctgcatgatcaagacctgcgcctctgcctgttaccacctctggatccagacctgtaagtacagagatcacagcgctggaagtggtggtatttccaatgcccatttctcctgtaccagccagatcacagcctttttcatataagataccggctacctcgatccccacttccaatgcttttacagcctcttttctggtcatggcaggttcttttaagaaatctctggttccccaggcgatcttacggtctaaaattccggtttctgtcatatccgccgcgatccccacatctacaggaaggacttctgcccctgcacaggctgccatcaggcagacgcaggatcttctggctgccatatttttggcaactgctgctgttacgtcctgtcctgtctgggtcacaccttctgctacgatcccattgtccgcgcacatgatcacaatacattttttatccagggaaaattcttcccgcctttttacccctgcaatgcggcagatatcttcttctaacacgcctaaactgtttaatggctttgccacccggtcccagtgggcttttgctgactttactgcttctttatcaatcggttttatcccctttaacacagtttccagggaaacagtctgtttctggttcattttactgctgcctctttcttttcattctgtatctgtcacaggcctgtacaaaccgttccccaaaaccttccagggaaggataatacaaatggggaaaacctgccattacctgattttttacagtgacgcagggccagctgcgctttcctgttggcttttttgcctgcattttgagttcattttcatcctgggtactttcccagtaatggaattcatgacctttgatggtctcgcctgcttttaaatacagactgtccttttctgtctgtaccgtaatatagccgaaatgagaattttttccttttttgtagcctttcccggaaaatacacctgccatctcatagccggttccattttcatcttccagttcttttaaaagatagagataaccgccgcactctgccagaatgggcatatcttcctctgctttccggcggatctcatttcgtatggtctcattttcttccagcgcttttgcataaagctccggataaccgccgccaagtaaaagaccatccagatcatctggaagatgcttatcatggacagggctgaactggacgatctgaacgccctgtttttccaaaaattccagattgtcccgatagtagaagcagaaagcttcatcccaggcaacgcccagacggatgggaatagctgaatgtgagattttttctcctgcaaattggttttgcaaaaccaaatcagcatttttctgagcttcacacttctggctggaaccatctgctgtcacagtcacagaccctagcacatctatatctgctttttctcccagcttaagtaatacatccacatccaatgtcttctccagacagtcacctaactgcctcatctgctcctgaaggttctcgatctccccaggaagcacaagtcctaaatgacggcttcccacctgccagaaatccagttccggtacatatcctgctaccagcacacctgtttttttttcgatcactgccttcatccgcggatataacataggagagatcctgtttaatatcactgcctgaatatgatttccatttttatttgcctgagaagactgggactccccctgaaagacctgaaagcccttgatcagcgccgccagggaaaggctggctccttttgcatccactaccagcaccaccggcagatttaaaatatccgctacctcccaggaactggcagctgttgtatctccgcctaagccgtcaaaatatcccattacgccttccactactggaaaatgcgtttcagacactgctgcatatttttccctaatatcctgtggctgttcaaagaaactgtccaggtttcctccctcaatgccaaggactttccgatgaaacagcccgtcaatatagtccggtccacatttataggaaaatggatttttctgttttcgttttaaaagttccaggatgccgcaggtgaccatagtctttccgctgccgcttcttggagctgcgatcatgaatccagccactctatctcctccacatcgtcttttaccggatgctgcatcactgcaatgtataccggattctgagctattggcatatggtagctgccaagctgtttaacaggagaaacctgaacctgcagaagttcaccgtcttcaaacccatattccttcatacatgcaaggatctctgatacagtttccaaagtaatggcatttgccacgatccgcaccgccggatttaagtttaacagggtaccaatgatctccttcatctttccgccgctgccgccgataaaagcatgggtaggtgccggaagtccctcaaaagcctccggtgcttctccctctacaatgtggatatcttcccagtttccatgaaacttttgcacatttgcccggatcagttccaaagcttccggttcccgctcaatggcatacacactgccttcattacagcttcttcggatcgccagacccatctccacggatacagagcccgttcccgcgccaatatcataacagacactgtgattaccgatataaagtttctctatagacagccggcgaatggtttccttggtcatcggaacctttccccggatgaaatcttcgtctttcgggtgctttgtgagataaattctcatctcttctgcgtgaggatttttcacaataacgcaggcaagacttccaaagggcctcttctcctcttccatcagcaattctgcaggggtagcttcgcagagaatacgttctgtttcgtatgagaaattttctccagcccatattttcacatttccaagtccattacttaccagttccctgcaaagagcagaaacactgccctttcctcccagtaagataaaacagtcttcataatgacggatatgggaaactacgtcgcagctgcggccatggctgctgatactgtgaacattctgccagcttctgccgagtctggcgcagaaataagaaagactggatacaccgggaatatattctacctcccagccttcctgcaggaaagctttggaagccgcttctgccccgctgtaaaagccggtatccccggagagcaccagcactgcctcatcccattcaaaagaagaaagccagtttaccatttcactgggcttataagctgccagcactgcttttccttctgtataaggtgcagctgcatctaacatccttctggctcccattacagcatctgcccggtctaagcagtctaaaacctcgcctgtcagctggtcatcctgccccattccgatccctgcaagatagataatgggttttctctcctcatattcattctgagacatccttcatccactcctttactgcttcttttgtctgctctaaggacattcctttatcttttggccggtcgatcacaacagctgttgctcccgctttttttgcagcctgcatcttttctttaaagccgcctgtatctcccccgtcctttgttaccatataagaacattgaaattccttcaattgtatataattcatttccgctgaaaacggtccctgcatggcaatgatatgtcttccgctgtagcccagttccctgcagatatgaacagaagcttccacaggaaggactcttgcaaaaatccgttctaaatgtcccggaagttcctgccacagaactagttccttgcttcctgtagtgaggaagatatttccttctttttcagaaagataccggactgcctctgctgtatttttcacatggataatgccatttttatcgcctttgctatcttttgcctcatcttcactttcttttcgcaggcagcgcagaaggcagatatccggatatttttcacaggctttccgaatattggcagtcaccacctgggcatagggatgggtggcatcgatcactagagacgggctctcttttttcaaaaaagcttccatcgcaccctcgtccaggcgaccgcagtgtaccgttaaatgctttaaagacatttcttcttccagaagctctgcaccgtattccgttgccacgcagacgattccggtaacacctgactgttcgtccagccagttagccagtatccgcccttctgttgttcccgcaaagaggatcacatgcttttttgccatgttatttctccttcttttgcagatagcctcttggtgtcaccatccatttgccgatctttacagtactggtttttccaatgaatactgtcgtaaacatatccgccggataatcagccagttcttttaaagatattaccttcatctcttccccatctcttccaatacaggaagctacaccgcagactgtttccggtgaacggtatttcatgatccgctcacaggcctgctttaaatagtccggtctgcctttgctgcggggattatataagcagataacaaaatctgcctgggctgccttttctatgcgctcccagatcatttctatgggtgttaaacggtcacttaagctgaccactgcaaaatcatgagtcaacggtgctccaaggcctgcagcaccggcacaggcagctgtaaccccgggtatcatcttgatctctactcccggatactgtgctgacagctccaggatcagacctgccataccgtaaacaccgctgtccccactgcagatcatggctgtatctttgccttccatacagcattcaaaagccatacggcaccgtgcctcctcttttgtcataggcgtggtaagatattctttgtccgggaaatagggctttacaaggtccgcatataccgtatatccagcgatcacctggcagtctccaatggctttaaacgcttcttttgtcattccatctaaggaacccggtcccatacctactacgtagagttttcctgatgctgctatttccggcacagccgaaactattttcccgctgtgggagctttctgccatacggaattctgttgtaaatcccggatcatacagttttgaccggtcatagccattttgtgccactgtatttccaactacgatcaaggctgtttttgtaatatgttcacgctccgctgcctctgccagtcctgccacggtggtacacacggttttctcttccggccaggttgccttgtatacaatagcagccggcgtatccgggctgtatccccctgccattaattcctttgacagttcttttaacattcccgtacttaaaaagatcaccatggttgcctgatgagaagcaaactggcggatgctctctctttccggcaccggtgtcctgcctgccattctggtaataattacgctttgggatattcccggaagagtatattccatctgcaaagccgctgctgtgccacagaaagagctgactcccggacagatatcataagtgatccccagcttgtccattgcatccatctgctctctgatagcaccgtagagacagggatctcctgtatgcaggcggactacttctttttgctctttccatgcctgttctataacttccataacctgttccagggtcatttttgcgctgtcgtagatcacagccccctgttttgtctcttttaataaacctggattgaccagggaacctgcataaataacgatatctgcctgttttaaaagtctcagtcctcttactgtgatcaggtcctctgctcccggaccagctcctacaatgtgtaccatatttctcttcctttccggaatttattttcgtttattttcagtccagtttcgtcatatcctgggccagtatcctttttaacatgtccatggctccgggagacattcccagtatccctctttcattggtaaacaggatacattctaccttcatggactctcctgcccgcaatgtcagatgctcccaggcccgtcttaccacctgttccataaccttttcacgaagccccggcactgtctctaaaagttttaatccctgatctacagtaacggactctaaaatctcccggatcagctccggtcctgcaccgcaggcaccaccccaggctgccagagtttccattcttccatctgctacagaagaatgggtgttcatcacaccggctgccagcttgatcagcttccctccatgtccgactaacagtacctccccaatattttcctgcactgccatgtccagagagtcaccaataaaattactgcactttacagcgtaatccagatttacattcaactcatcccgtaaaaagctttccccataattccccggtgtcaggatcatgcttttaagtccggccacatgtttctgatgcaattctaactgtatggtatcggtaagtgctttctcactcataggctctaccatgccactggtccccaaaagggagataccgcctttgatacccatacggggattaaaggtctttttgctgatttctattccctgaggaataaatatttcaatatgcagactgccctgaaatccatgttgtctgcaggctctttccacatgggtaaagatcatttcccttggtaccggattaatagcaggttttcctacttcacaggccagtcccggctttgtaacgatacccacgccctctcctgctgtaagatgaagccggataacctcattttcccagatatagccttctgtctccggtttatcatccctaaatgatactctggaatagatagcgatcccattggtcacatccggatcatctccggagtcctttcgcacagcgcagactgcctgctcctttgtaaaacggatctcctcgatctctagatccaggtctagccccttaggtgtagagactttcacctgacccacccgtttctgtccaaggagcataagagccgctgccatagaagccgccgtcccgcaggtaccggtggtatagccccatcttaactttttctgatttttatatacatacatttcttccatagcaaatacccacagaccctttatgatcttaaaaatcctcttgtggtatcataccatattacccattactctacaacgcaaaaatgggacctttcggtcccaaaactgtgtgtctgcatatagcggcttttatactgcatcgtatattttttgtaaatactctacatcctgatgataccgctcttttgtggaattttccagaagcattgtaatataaggcttgtcttttttcaggtttttcattaaaggttcataatggaacagaccttcccctacatgggcaaattccggttttccttctttcatcacgaaatcctttacatgaacaaccgaaatacgatctccgtaaagacgaaatgctttattgatctcttcatcctgatctgcaacatgctctgcactgatcaggtttaccggatccaaaattgcttccacatttggagaatcaatgtcttctaaaaatctcctcatgatctccgggcagtaaagagtatgatcatgaaccgcctctactcctacgatcacccctaatttctccgcagcagatacaatttccctcatgctctttaataacaactgatagcagccttctgtataggtatagggaactaccttaaaacctgcatcataacgtcctgtttccgttcccaccatgtcggcgcctataaccttcgcatattttaaatgttcaataaactttgctactgctttctggcgttctttctcatctggatttacaggattgatatagcaccccagtacagccacatgaatatcattttcatccagtttttttctgatcatccgtgcaaatccaggcgaataatgaccatgatcaaaattatatccggcgatggattttcccatcgccagctggatctgatctacgtgattggcagcaattgtgtttaccagtgtatcaatatccgtctttgggcagaggtcatggcatctcattccataattcatagttttcccccaacaatttataaatctacagtaataaagatatcataaatcgccttgatagcagtctcaaaatcagcgttcttaacaccgataatgatattccattcactggatccctgatcgatcatctttacattgactcttgcatgtgccagtgcggagaagatacggcctgcagtgcctctgttggagcgcatacctctgcctaccactgcgatcagtgccagatctgactctaattcaatggtatccggctctgccactctgtggatacctgctactacagactgctcataagcctcaaattctgactgatgaacgaaaacagtcatggtatcgataccggatggcatatgttcaaagttgatgccgtatttttcaaatacgcttaaaacttttctcccaaaaccaacctcagaattcatcattgccttttcaatgttgatagagcagaagcccttcttacctgcaataccggtaatggtatgacgcggcttgcggcaggtagtctctacgatcagggttcccttatcatccggacggttggtgttgcggatattgatcggaataccttccttacgtaccgggaaaatagcatcttcgtgaagaacacttgcacccatgtaagccagttcacgaagttctttataagtaatagtctcaataacctcagggtctttgataattcttgggtcagctactaaaaatccggaaacatcggtccagttctcatagagatctgcatggatggcttttgcaacgatagaaccggttacatcagaaccacctctggagaaggtctttacagtgccgtcatgacgagaaccgtaaaatccagggataactgctctctctacatgctctaatcgctcagaaagctctttatccgtaatatctgcttcaaagtttccattatcatcaaagaaaataacctctgcagcgtcaataaactcatatcccagataatttgccataacgataccatttaagtattcgcctctggaagcagcgtaatctcttcctgcttttgcaaggaagttttcttcaattttatcaaattcatgatccaggttcaggttcagatccagtccgtcaatgatctcattgtatctttctttgatcttgtcaaggatcttcttgtaagaacgtccctctgctactgcatcataacatgcatacagcatatcggttaccttctcatccttgtcattgcgcttgcctggtgcagacggcactacatatcttctggatttatccgctttaataatgtcagccacttttttaaactgctttgcatttgcaagtgaactgcctccgaacttaaccactttcttcatgatctttatctcccttaaatcgtagtaaaacacacctttttgatcagtctctgatttagtgcgttacaagtgcaaatgataccgtacttttcccatcatgtcaatagttttggactaaaaaatttgccgtgcaaggacaaatgtctttgcacggcatactttaaaatggttctgtcttttatttaacgttttatttaagcttctgctcttagcctgttaacgcagcattttaattttccacttccttatttacagactcttcacaggaacgcatggcaagaatggtcttttccatcagttcttccagtgtccagcccaggttttccgcaccttcacggatcacatccctggaacatccggcagcaaactttttatctttgaatttctttttaaggctggaaacttccatatccattacgctgcgggaaggacgcattctggctgctgctcctacaagacctgtaagctcatctactgcaaaaagcaccttttccatctcatgttccggttttacatcacaggcaatgccgtaaccatggctgcagatggcgtggatcagttcttcttctgctcctgcttctcttaacagctccggtgccttgatacagtgctgttccggatacatttcaaaatcaatatcgtgaagaagtcctgccatagcccagaaatccgcgtcttcaccgtatcccagttcatttgcaaaccatctcatggttccctctactgtaagaccatgtaaaatatgaaatggctccttattatactttttcagtaattccaatccctgttctcttgtaagtttcgtagtcatctcttctgcttcctttccaccggatattcagatatatcctgtaggaatatatctttttatttttcactattataattctcacatgtaaaaaatgcaaggctgactgccttgaaaatccttaagactgtgattatactgttactaaaataatataaatgacgaaagagttaaaaggaggtatccctatgttaaattacagaaccgcccaaacagcagacctgcctgccatgatgaaaatggtagaagaagccaaagaaggatttcgggctagaaatattgaccagtggcaaaagggagaaccaaacgaacaggggcttacagaaggcattgaaaaaagcgttgtacatgtcctggaagaaaatggagaagttttaggcatgatcaccgttgtgcccggtcctgaagccgactacgctgttatcgacggcgcctggctgaatgacgagccttattttgctttccacagagtctgcgtatccgaggcacacaaaggaaaaggactggctgcaagcctcttctcttattctgaggcatttgcaaaagaaaagggtgtcagaaacattcgtatcgacacccatccggacaatctctccatgcagaaagcattagccaaaaatggctatactttctgcggaaagatcacattatgttccggaagcgaagccggagatccccggttcgcctaccagaaaattttaaattaatgcatatagcgttggtttgacctgagattggtcatgagcccaattataccccggtgaaagcgctgtaaccgccgtctacaggcagtacaatgccatttacaaagccggctgcatcatcacttgccaaaaacagggctgcgccgatcagctcctctggattgccaaaacgtcccataggagttccggcaatgatgtctccggctctgtctgtgtaggagccatccttgttaaataacagatcatggttctgctctgctgcataaaatcccggtacaatggcattgcagcggatgccactctgtccaaagtggatcgccagccactgagtcaggctctggacagcgctttttgcattggaataagccataaccttggaaagaggaaggatagaggaaacagaagcgatattgataatgcttccctttctcttttccaccatatctctggtaaatacctggataggcagtaaggttcccatgtaattcagatccattacatttctgatattctcttccttcagatcccagaaagaataatcgtcctcctgtttttccttctttaacatttttacagaggcaatggctcccggctggtttccccccgcgccgttaatcaggatatcgcagcttcccagcgctgctttgatctgctcataagtctttaccagttcttctttatccagtacattgcagctgtagccttttactgttgcttctttgctgtattcatttttggcattttctgtaagggtctcagacattttcgccagtttttccttattgcgcccgataatggcaactttcgccccgttcacagccagaccatatgccatagcagaacaaagcacaccgcttcctcctgttacaatggctgtttttcctgtaagatccacactaaaaggtactttcatcgcttctcctctttccgcgccctttagggcactgttttatatttactgatacatgaaacatatgtaggtaacatgtatgatcatcctgcatcggcataccggtataccggccatatatatcaatatataatataaaatatgcttcccgtcaactggtattctaaactttattttattaaattttcccccttttcatcaatacaaaaatcccggaagataatccgaatttctcaagaccgtcttccgggacattttacaatattacactacctgtgtcatagcttactcttacttaaagtacttcacaccagactcaaagatcttcatatcctgttcgccgtaaatgttcatggcaactgcctcgcctcttctctcagagtgagccatcttaccaaggatacggccatccgggcttgtgataccttcgattgccatgtaggaaccgtttggattccagtattcgtccatggtcacattgcccttatcgtctacatactgggtcgctacctggccatttgcgatcaggcggtggagccatgcttcgtctgctacgaaacgtccttcaccgtgggaagccggattgcagtatacaccacccagttttgcttctgccagccatggggacttatttgtcataaccttggtgtaaaccatcttggaaatatggcgtccaatggtgttcatagccagtgtaggagaatttggcttctgctctgtgatctttccttccggaacaaggcctaacttgatcagggcctggaaaccgttgcagataccaagcataagtccgtcacgttcatttaacagcttttctacctcttccttgatcactgcattgcggaatacagttgcaaagaatttagcggaaccgtctggctcatcaccagcggagaagccgcctgggaacatgatgatctgtgcctttgcgatctctttcttgtattcttctacagactcacggatatcctgtgcacttaagttcttaaatacctttgttactacctttgcgcctgcacgttcaaaggcttttgtgctgtcgtactcgcagttagtaccagggaatacagggataaatacttccggctgtgccagcttgtggtcgcagatgtaaatagtatctgtatcgtaaagcttttcttctatctttgcagcttcgcctgtcttttctttgcctgtaacagttgggaatacgtcctctaaggtcttcatccagcttgctaaagcttcatccatggtaatggtggtatttccatattcaaatacacccttgtctgttacttcgccaagtaaagtatatgggatggaaagttctcccacttttccttctgctacttcgcatacgatattgccccagcctgcgccaaagaaatctcttggatctacattgtgctcgatcttaacgcccatcttgttgccgaatgccatcttgcttacagcttccgcagcgcctctgccttctactgcatatgcagaaaggatctttccagccttgatatcttcaaacagctttccgtagccgtccatgatctgggcgtaatccggcagatcatagttatcacggttgatcttaaattctacgatcttgcttcctgctttcttaaattcaggagtaatgatgttcttgcagctgtttacatctactgcaaaggaaacaagtgtcggaggtacattgatctcaccgtgttcatcatcaaaggtaccggacatactgtccttaccgccgatggaaggaagtccaaagcccatctgcgcattgtaagcaccaaggagtgctgcaaatggctggctccatctggttgggtcgctgctcattctgcggaagtattcctggaaagtaaagcggatctttttataatcaccgcctgcagccacgatctttgctacagaagagacaactgcataaacagcgccatggtatgggctccagctggaaagatatggatcaaagccgtagctcatcatggtaacggtatctgtatgtccttctaatacaggaagctttgctaccatggactgtgtttctgtcagctgatatttgccgccaaatggcataaatacagaacctgcgccaatagaaccgtcaaaacgctctaccagtcccttctgtgagcacacatttaagtcggacagcatgttcagccatttatcttttacatttcctacttctttcttatcaaaaagatttccctcatgtgcaggaacctctaaggtaacatctgcttcctgatgagcgccgtttgtatcaaggaaagcacggctgatatctacaatggtctttcctctccagttcatcaccagtcttggatcttcagttacaactgcaacggtaactgcttccaggttttcttctgctgcatagcctaagaatttctctacgtcagcaggatcaactacaactgccatacgctcctgggactcggaaatagcgatctcagtaccgtcaagacctgcatatttcttcggaaccttgtccaggtcgatctgaagacctgctgccagctcaccgattgcaacagatacaccgcctgcaccaaagtcattacattttttaataatggagcttacttccggacgacggaacattctctggatcttacgctcggtaggtgcatttcctttctgtacctctgcaccgcatacctcaatagaagcagtggtgtgtaccttggaagaaccggtagcacctccaataccgtcacggccggtacgaccgcctaaaaggataatgatatctcctggatcagaggttaaacgctttacatattttcttggagcagcgcccataacagcaccgatctccattctcttagctacataacctggatgatataattcttttacataaccggttgccagaccgatctggtttccataagaagaatatccggcagctgcgctggtaacgatctttctctgaggaagtttgccctttaaagtctcatttaatggctttgtaggatctgctgcaccggtaacacgcattgcctgatatacataagtacggccggataacggatcacggatggcaccgcctaagcaagtagccgcgccgccgaaaggctcgatctctgttgggtggttgtgagtctcatttttaaaatttaccagccactcttctgtctttccgtcgatctcaacaggaactacgatgctgcaggcattgatctcgtcagactcttcctggtcttctaacttgccttcgctgcgcagcttcttcattgccataagagccaggtccatcaggcatacatatttgtccttgcggtccttgtagattactgcacggtcagccaggtatttcttataagtatcttcaattggcttcttgtattcgccctctgtaaaggttacatttttaagctctgtggagaaggtggtatgacggcagtggtcagaccagtaggtatctaacacgcggatctcagttacagttggatctctgtgttcttctcctgcataatatttctgtatatataagaagtctttgaatgtcattgcaagatttaaggtatcatataatgcctttaattcttcttcagaagcctttgcaaagccttcaaagctcttaatatcttccggaacctcaaactcagttaccagagtctttggcttgtcctcttctgcctgacggctgtcaaccgggttgatgcagaaatggcggatggcatcttcctgtgccagagtcagcggtgctgtgatcacataggtagttgctgtacggatcaccggttcctcatcttcttttaacagcttgacacactgcatggcagagtctgctctctgatcaaactgtcccggcaggtactcgacggaaaataccagatctcccgggttctttggaaattcttcctcataaacctcatctacaggcggctctgagaaaatggttcccagtgctttcttataggtatcttctgaaagattttcaatatcataacggatcagtacccgtacactcttcactccggtaatgccaaggtagcttactaactcttctcttaactctcctgcttttaccgcataatcaggctttttctctacaaaaattcgtcttacgctcattacagacctcctgtttttcatagcttttagcttcttctgtgccggaccattatataaatggcctcgtttgcctgttttactttaacttttgtctctatcatagcacagattatataaattagtaaaattaatatatttaattattcttatatttgttacttataagtgttctgtgaatgttttacaatttctttccttatatttataaaaacctttcaaactacaacttttaaaagttctggtatggcatgtaaaattatgctatactaaagtaaatgcgcaaatgtacgtgtttaaataagagaaatcatagcaggagatacaagaacatgaaaatcggattcgacaacgacaaatacctttccatgcagtcagagcatattaaagagcggatcggacagttcggtgacaaactgtatctggagttcggcggcaagctttttgacgattaccatgcatccagagtccttccgggatttgcaccggacagcaagctacgtatgctgcttcagttagctgaccaggcagaagtagtcatcgttatcagcgctgctgatattgaaaaaagcaaggtacgccacgacctgggtatcacttatgacgtagatgtgctccgtctgatccaggaattccagggaaaaggcctttatgtaggaagcgtagtcatcacccagtacagcggccagagtggcgctgaccagtttaaggtgaagctggagcacatgggcatccgtgtataccgccactactgcatcgaaggatatccaagcaatatcccgctgatcgtaagtgatgaaggttacggcaaaaatgactatatcgaaacttccagaccattagttgtcattaccgctccaggaccaggaagcggcaaaatggctacctgcttatcccagctctaccatgaaaacaaacgtggcatcaaggccggatatgcaaagtttgagaccttcccgatctggaaccttcctttaaagcatccggtaaacctggcttacgaggctgctactgctgacttaaatgacgtcaatatgatcgacccattccacctggaagcttatggaaagaccactgtcaactacaaccgtgacgtggatatcttccctgtattaaatgctatttttgaaggcatctatggttccagtccttacaaatctcctactgatatgggcgtaaatatggccggtttctgtatctgtgatgatgaggtatgctgcgaagcttccaaacaggagatcatccgccgctactatcaggcattaaaccgccttgcaaaagaggatgacaactctgacgaagtttacaagttaaaactgttgatgaaccaggctaagatcactcctgagatgagaagtgtagttggtccatgtttaaagcgcgctgaagaactttcctgccctgctgctgcactggaattagatgacggacgtatcgttacaggaaagaccagcgatctgttaggtgcttctgctgctgttctcttaaatgctatcaaggttttaggagatatcccggatgatgtacatctgatcgcaccttctgccattgaaccgatccaggtattaaagaccggttatcttggcagcaaaaatcctcgtcttcacacagatgaagtcctgattgccctgtccatgagcgctgctacggatgagactgcaaagaaggctcttgcccagcttccaaaactgcgcggctgccaggtacacacttctgttatgctttctaatgtggatattaagacattcaagaaactgggtgttcagctgacaagcgaacctgtttatgagcataataagctgtatcattgattgtgaagaataaaatattgtttaaaatgccctcagttggcatattgacattcctatggaaatagaatataatgtgatttactaaaaaatgtgataatttccatcaggcaacaaaaagatcccccgccatctggcgaaggatcttttttatcactctcttacttcttctctacgtctgtataatacaggtgtcttggaagtccgtctgtcatgatcggggttaattctgcctggatcagcggacggatataatttacaaattcttctgttacataatcgcctgcttcattgatccagtttcttggaacctttttctccacatttgcgaccttatgtacatcataaatatcagtaacgcagatatatggatcatcagaaactctctttaagatgatcatcttacctgtttcaccctcaaacgcttcttttacagcagcgccgccaacctggtaagcctcagtgatatccactctggatacaatatgggaagcgcatctctgaagggagttaaattctattgctctggtcttgcagcctacttcacggttgatcttctcagccaggaaacgggcagttccagtcagctgcttgtgaccgaaagcatctacgaaatcaataccgtctgttaattcacatacatatctgccgtctgccgtcttcacaccttcagatacagctactactacagactttttcttcttgtgaagctctgctacctttttcataaattcatctacatcaaaagtaacctctggcagaaagatcatgtcagggccttcgcagtcttcgcattttgctaaagctgcagcaccggtcagccagcctgcattacgtcccatgatctctaagatagtaacattctgctgatcatataccagaccatcacggatgacttcctttgtaatggaaccgatgtattttgcagcacttccgtaaccaggtgtatggtctgtagctgccaggtcattatcaatggtctttggaacacccataaaacggatgttgcttccatttaataaagaataatcagaaagctttttaatggtatccatggagtcatttcctccgatatagaagaaatactcgatctccaatttatttaaaatgtcaaaaatcttgtcatagatctctctgtcctgagaaatatccggcagtttgaaacgacaggaacctaaataagcggaaggtgttctctttaaaagttcaatgtccaggtcatttttaatgtggtcctctaaatccacatatctctcctgtaaaagtccctggataccgtggagcataccgtacaccttatttgcccctctgtcttttgctgttttaaatacacctgcaagacttgaattgattactgctgtagggccgccggactgtcctacgatcacattgcctcttataccattcatcttaaaatacctcccatgttttaatatgtaccctcaaatttttcgaacgtacattgtaagcgcttacacttatattttttattgtaatacaggatggggagaatagcaagtaattttaaacgcaaatttttttaggtttttacaatttttttgttgataattttaactatatttgctacaatatttacagggtgttagctacatttttaacaaatatatttttattaggagggtattatgaaagaactattattcttagtcccggtcgtaggactggcaggcttactgtttgccatttttcttaagtcctatgtgatcaaacaggatccgggcactgacaggatgcgtgaaatcgcagacgcgatcgcagaaggagccagagcattccttgcttctgaataccgcattctggtcattttcgttgctgtattatttgtcgttataggtgttggtacccgcaactgggtaacagctgtatgtttcctcaccggaagccttttctctactgctgccggttatctgggaatgagcgctgcgatccgcgcaaactgccgtactgcaaacgctgcccgtacccagggtatgaaacgcgccctggctctggcattttccggcggaagtgttatgggtatggccgttgtcggtcttggccttttaggcgttggcaccctttatatcattaccggtgatgtttccgttctctccggtttcagcttaggtgcttcttctatcgccctgtttgcccgtgtaggcggcggtatctatacaaaagctgctgacgtaggcgccgacctggttggtaaggtagaagccggcattccggaagatgacccacgtaaccctgctgttatcgcagacaatgttggtgataatgttggtgacgttgcaggtatgggcgctgacctttttgagtcatatgtaggttccctgatctcagctctgactcttggtattgttttctatcaggaagcaggtgttctcttcccgcttttactttctgcagcaggtatcatcgcttctatgatcggttctgctttagtaaaggcgattggcaatgctgatccacacaaggcattaaaaaccggcgaatacagcgctactgctctggttgtgatcagtgctctggtattaagccgtactttctttggcaacttcttagctgctttcaccgtgatcgccggactttttgtaggtgttcttattggtgctattacagaagtttatacctctggtgactaccgttttgtaaagaagatcgcaaaacagtctgagacaggttccgctactacgatcatcagcggtcttgctgttggtatgcagtctactgctgttccgatcctgttagtttccgcaggtatcctggttgccaaccgtttaatgggactttacggtatcgctcttgctgctgttggtatgctttccacaaccggtatcaccgtagctattgatgcatacggtcctatcgctgataacgccggcggtatcgctgaaatgtccgaactggatgactccgtccgtgagatcactgacaagttagactccgtaggtaacaccactgctgcgatcggtaaaggcttcgctatcggttccgcagctctgactgctctggcactcttcgtttcctatgcagaggctgttcagttaaagaccattgatattttaaatgcacatgttattgtaggtttatttatgggcggtatgcttactttcctcttctctgctatgaccatggaatctgtatccaaggcagcacatgagatgatcgaggaagtacgccgtcagttccatgaagacgccggtatcttaaaaggaacttcccgtccggattatgcttcctgtgtttctatttccaccaatgcagccttaaaggaaatgttccttccaggactgatggcagtccttgctccgatcgcagtaggtctgatccttggacctgacgctttaggcggactgttaaccggtgctcttttaaccggtgtacttatggccatcttcatgtccaactccggcggtgcctgggataatgcaaagaaatacatcgaagaaggaaatcacggcggcaagggaagtaccgctcataaagctgctgttgtaggtgatacagtaggtgatccatttaaggatacttcaggaccttctatcaacatcctgatcaagctgatgaccatcgtatctttagttttcgctcctctcttccttcagtttggaggactgatctaatacatagatcctatataactgattgaaaatgtttaaaacagccaaacccatttttagaaaaaggaccctgcagggaatgatctctgcaaggtccttttttctgaatttctccacatcatctgttttacagcaaatgcttataatcatcaaactctaccagcacaaaacgttctgtttccggctcgtattcaatggtggtaatacttgcgttgtgggcaacggtggatgcagcaatgctttcgctgcctaaaagctgctccataaaatgagccagcagaccgccatgagccacaatcgcggcatcacctgtaagctggggtttgatctccttccatgcctgacggcagcgctcattgacctggttaatgctctctccctcaggaggcgctgtttctgccggatgggaccaccatgcctcatacagggctctgtcatctcttaaaagttcttcctctgtctttccttcccagactccgtaattgatctccatcagatcccttacagggatcaccggaacacctgcaggagaagcaactgctattgctgtttccatggcacggatctggggactggaaaatacagctgtaataggacggttttccattgctttcccaaggcactgtgcctgaaaatgtcctctttcatttaaggggatatcctgccgtccctggatcttcttggctatattccagtctgtctgaccatggcgtatgatgtatagtttcattttactcttcctctttctgctgctcttccgatactgcaccttctccgtttacagtgatcgcatccagagccagtttcataatatcttttacttcatcttctgtcattttcatcttttcagccagttctgccacagttgcttctcttcccagctcttttgccatcacctgggatacagtctggagtacatttactctggctgtcatattttcttcgatctcagcttctgtcttctgttcctctaaagctgcctctactgcctgacggatctcctgggctaaaaattcctgccactgctgacttccgtcataagctgctgcagctgctgtaagggccacatttgcctcctgtaccacatcagacataggaagctctcttccctcgtattcttttaccatctgggcaacttttgccagagagccttctaccaggcgtttctttgcctctttatcccctgtagctgcaagagctaaaaccttttcttcttcctctgcctcaagtacagggatcaatgccatttcttctaaatacatttcataaaaatttacttccataattttccggttttctcctgttctaaattaaatctattgatgaagtctgcggatgatcctgtaaagcagggttccttccatgatcaaaggctgtccacaggcaaaaaatatggttccttctgtaggcgaatggatctggctgatcacggaaccgtcatccggactgatcacatctgccagcacctccccacgctttacttcatctcccggcttaaaataacgcctgtaaattcctgcattatcagagcagacactggtaagatcctgctccaccactacactggcaatataaccgctgtgactggtgtaacgtaaaatccccatacgggtaagaaaacgtaaaacagccgatacagcctgttttgcagaactttcatctacctggtcacaggctcctgtataaatggaaaacgcatgggtgttccactgctgccagttataattaagggttgccttatcataaggacgcggacttcgcataactacataaggcagtccaaacagattcgccagactggcactttccattccagcttccatcatacgcacatggggaacaaaatctccgggcatataaaagctgggaaactggataccgtaactgtagccttttactttttcaaaaagtcctgcagcaatccgtttcgttgtctctccttcttcgtttcccggaaacatacggttaatatccgtattatctcccggccagaagcgctttcctatattaatagaatagtcatttacatggggaatcacaaggatctcattgccatttacgatcgatccccgttcttctaattcttttaaacttttcaccagcagagcacctatatacatctgctggatctcattgccacgcatagcccctacaatacaggctgctttttcaccttttccaaagcgatatccgtatatgtccatattttccctgtaaagactggaaagggagtatattttttcttttctcatccttctatctcacctcccagtactctggcgatcagagaacctggcattacaaccggatattccctgagtgtaaaaagcaggccatcctccggagatacgatttcctcctctactgtaccattgataggatttaaaatctgtccgatcagttcgccctttttcagatcttttctgtgctgtgctgccggaagaaaaatacccggtttaaccgcattgataaaacatactttccgattttgagatgaaaccggtatgcatggtacctttatttctccatcccatacacctaattcttttaacaatgaaaagatgccctctgttaattgatggccgaaatctctggtaatgcgcatgcctactcccatttctactaccaatgtaggtactcccgcttcatttaagctgtgagccagcgtagattcctgaacagtagctgccgaactgatccagataaaatctgtattcagtttttttgcatatggaagaagtttttcggccatttctgcactgacccttacctgtggaatttccctgaggaaaatattgctggcatggatatcaatgcaaagagaagcacctttcagatcctccatgatcttatacgctgcgtattccggcagggagctttcctcagaacccggaaatacacggttcatatcaagatcaaatcccggaacacctctggtgatcgaatttactcccagaggatttaacgcaggataaatttctacgattccctttaaatattccaaatgttcttcaatccgtctgtttaattcataacagacaaactgcccctccagttcatcaccgtgggtgccggttacaatacatactcttttttcactgcctgttatcaccattggttttaacacattcttctttacaagaagccgctcaccggcaggcagtcctaaggatactactgtctctatcattacttgtattctctgcctttgtctaagttttatgtctgttataaagataatccatccctctttattcgtcaagttttattcatctttacaaaataaagtcacccgtgatagaatataggtaattataaggaggacttaataatggatattaattatgaattatacaaggtattttatcacgtagccgttacacttagtttctcggaagcttccaaacagctttttatttcccagtctgctgtaagccagtccattaaggtccttgaaaagaagctgaaacagccgcttttcatccgcagtaccaaaaaagtacagctgacaccagagggcgaaattttattaaaacatattgaaccagccatgaacctgatccagaagggggaaaaccagctgttagaggcccataccttaaacggaggccagctgcgtattggcgccagcgacaccatctgccgctactatctggtaccctacttaaaacagttccacaaagaataccccaacattcatatcaaagtgatcaaccacacttccattgaatgtgccaaagccctggaaaatggtcagactgattttatcattgccaattatcctaactctgctctcgcaggcaacctgcacacccgggtcatcaatgaattccatgatgtatttgtagccagccgtcaggcctttgacttggaaggaaaggaactgaccttagaagagctgttaaaatacccgatcatgatgttagaccgtaaaagtaccaccagtgaattcctgcaccagattttccagaaaagtcatttggacctggtaccggagatcgagctttccagtaatgacctgctgatcgacctggcccgcatcggtctcgggattgcttttgttccggatttctgtatcccggctaatgataaggatctgtttatcctggaactttcagaaaaacttcctgcccgtcagatggtggttgctttcaatgaaagccttcctgtatcccaggctgccaagcagtttatggatatgttgtaaaatggcaacctttcacagaagttctttgaccacacgtcagactgctgcagccactacacaaactgtccccagaaatcatctaccgcctgttttacattaaagcggttcacaaccgtataacgttcccattcccttggaaataatgccacatattcaggcagcaggaaacggtcatccaaaagggcaatcacccctttatcatttacagtgcggatgacccggcctgctgcctgcattactttattcatccccggatactgataggcgtaatcaaagccaccttctccctgttcgtcaaaatattcctttaagatctcctgttccggatttacctgtggaagtcctgttcctatgatgatcgctccgatcagtctctcttctttcagatcgatcccttctgaaaaaataccgcccattacacaaagaccagcaaatgactcctttggttcttccttaaaacttaaaagaaattcttccctttcttcttctgacatattcgatgactgggctttccattcaaattttaactttccctgttcctgccgttcctcaagaaccttctgtacctgaaacagaaactgataggatgggaaaaagatcatgtaatttcctgtctttcctcctatgaccccttctatatagtcagcgatccgctcatactgggtcctgccccgtctgctgtaacggctgcttacatcagaagccgcaagtaccagccgtttatctgcctgaaaaggagattttgcatacacggcatattcttcctggcttccgcttaaaagttccttataataacggatcggcagcagcgttgcagaaaaaaacactgtactcacgccccggtccaggcattcccgcaggcagctggaaggattgacacacatcagttttaccataaaagagccatccgccagtaagcggctgtatatcctgtaattttcatccagccggtcacttacataaaggaaatcacggatcttaaaatacagatcaaggactgtctccctgtcatcaaattcgctgttttcatttaaaaatacttccatctccccaaacagccccattaactccagggaaagaagttttacatccggatgcatgcggtaatgttcccccagaaccatccgtgctcccccttcaaacgccagttccatgtctgcttcatcagaaaagggttctgtctcccccaggcgttttagatccaacatcctgcgattacaccgttctaacagcttcaggacttttcctgcctcggggatcccttttaagatcctttttgcagcaagcagctcttcctttataagaacagcactgtacatctccctggctcttgaaaccaggttgtgggcctcatctacaaggaaaatataatttcccctctcttctccttctgcaaaatagcgtttcaggcgcacattgggatcaaatacataattataatcacagatgatgccgtctacccagctgctgatgtccagacagagttcaaaggggcagacctggtatttctctgcatatgcaaggatcgtttccctagtaatcccctgctcttcctgtatgatctcataaacagcgtcattgacccggtcaaaatgtccctttgcccttgggcacgcaactggattgcagtccggtttttccaggatacacagcttttcttttgcagtaatggtcacagtactgaaatacaggttttcccgctcccttaacaattcaaacgtctcttctgccacgcttctagtaatagtcttggctgtgagataaaacagcttctccccatagccttctcctatagctttcaggcctggaaagacacaggataaggtttttccgatccctgtaggcgcctgtatgtaaagatttctccctctggcaatacttctgtatacagaaaccgccagttctttctgaccttccctgtatgcataaggaaactgcagttcttttaaacattctgttctgcggatgctgtgatggtaaaggtatctggcccactttacatattcatggatcagaccctgaaaccattcttccagttcttcccttgtttttgcctgacggaaacggcggatctgttctgtttctatattacaataggtaagctggatccccacactgtccagatcctgctcactggcatacatatatccataacacagggcctgtgcaagatgaaccggatccggctcttccaaacgctctacgtccatgtaaatacatttgatctcatcgatcacgatcccggacgtttctgtaatgatcccgtctgccctgccttctaaaaggatactgaattcatcttcccgcacctgatgtttcaaagcaacttctgaacggtaatccgctcccatgcgtttctggatctttctgtgcagcctgctccccgcctgcatagcctctttttttccgccctggctcctgcggttatccagatccccggaccgcaggacaaactctactaaattgcggacagagatgcggatcttagactgtgcttctgtcatcaaactgccttccaatgtttccctccatctgtactcctaaaattcatgactttaggataacacaaaaagagcaggaatgcaaactgatgttcgttcccgctctttttcttatttctgattcttattctgcgattgccatgatcctgtcatcccactttaagcagcagtggtagatacaggtgccagggtatccaggtattcttcaaattctgcattatcaccattcatctgtacggtcagtacccgcgccagatccaggcttaaaacacctaagatcgacttggcatcaatggtcacacggttatagaatacgtcaatatcaaagtcacatttcgttgcctctgctacaaaatgttttgcttcttctacagatggcagcatgattttcttttctttcataattcaagactcctttttaagatttccacctgttttttacaggcagatcatcctggttaaagtgtgtccgtccagtcactcctgaacgttggaatatatatagcactattatttttcaatgtcaaattttattcctcttttcagattatgccctttttcgtaaatatttatataaatcgctgtaaattatttttacattgtatctgattttatgcataaaagaaaggtggcttcccatatcctggaaatccacctgaatagttactctttttcttttgtttcgggagtttctttttccacccatttataaccgccggctgttttctgagctcctgtcatcgcacaggaaatacttctgcggctgatatttaaagcacggctggcatgagcaatagaaagatattctgctactacctgtccgtctaatgtcagctggatcagcggtctcttatcatggtatccgatcttgctgcttaagtccacctggatcggttcccagggcaggtcttccggaactacacgccacagatagcctcctcctgtcttacgctcgccatgggctgctctggcaatggagcctaaagaaacacctgttgcctcgtgggccagtcttgaacttttataatctgctatgggcattccatctttggaatactgccgatacacatgtcctgctttaattgtccgactcatttgtactctcttccttccgctcgtaaaattttctttctagccaatggagtagtcgccatttgctggtacgttttatttttcacagaccaacatagtcattataacaactattgttcattttgtccagattatatcctaaacttgcgaaagataatatcttatttttacaaaaccagggggagtattcgctttttcttatacttcatctgcagagcggatccccgttgccaccggacggatctcatcagatccgaaaggatcctgtgtaccattttcttcttgccatggtgctgtatcttctgccccttctcctgccgtcttgcggtctgccagtggtacaggacgcacagagataccattgatctccacatgttcgttaatagcgatcacaaggcagggccgtccgtcgatcatacggttttccaccagataggtcttatcgggggctaccttaatggtcacatccggggttttgatctcaaagctctttgtattcactacatttgatacagcgaaactggtttcaggaccgtcctctacatctgcataacgactttcaaattcctgaagtttttccggtgctgccccgttgttttccagaagctgtttaagctgtgttttattcagtaccggcggtgcaggttcatcttttgtctcttccaccagttcacttaaattttcatggatgctttttacagtctcaaagtcgcagttttcccctaaagtttcctctacgatagtctggaagatctctttctggtttttggcagacatagggatatggcagcccaacacttcatcgatcagtgtatccggcagctgttctccgtttttcgcataaagtaaaaggctatggatgtctgtattccggtcattaaatgcaggaaacaggaaactggtcacaggtgcctccaccagccagtcacggatcctgttttcaatcacattggtagtggaattatagcacagacctgccttggaaagctttacagggcagattgtacactggataaactcatacacataatcagaagcgtcaaacatctcagaaccgtctgtagcctttgcaggaatgtcatatgcacagtggatcaggataatataataattctctgcatagtcaaaattggcgatcacacggtcataaaattcctcgatcagcccatcgtcttttaattcactgtcccgaagctttaaaaggaaattctgggtaccgccctcttcttctgtgtgaaggggaaattccatattgatcagattttttccaatggttcctgaaaggccattgcggaaaatggtaaaatatttaaaggcttcttcttccggaagggataaaaatgcttccttcagttctgtttttttatttttctctgagtctacatagcagccgcagatccggctgatggcacagtttgccggagtgaaaagtttttttatttcgttgcattcttttttgttcatgtatgtatctcccctgtttttgtagattttaacacaaaagaaaaagcccaaaagccatacgacttctgaacttccttcgggttgggctattctctcaaatagtcagcaggggaagaggggctcgaacccccatctacggttttggagaccgctgctctaccattgaactattcccctatgttcttttgttttttgttttgttccctcgaacgagtattataatatcacaggtttccaacactgtcaacaactattttgaatttttttcaaagttttttcaaaaaaagtaattgcttatttttttctgttttttaatacagttttattgaaacataaacctgcctgacaccggcttttacaccaggcacaggcaggtgctgttctttttacgctatatttttataacaacccgatggcttcccgcacattcgacaccccgatcatgcggatcccctctgcaggctttatcttatccatatttactttcggaagcacacaggtggtaaatcctaacttagctgcctctgctactctctgggctgcctgggatacgccacggacttcgccggaaagacctacttccccaaagatcagcatacccggatctgcaggccggtctttatagctggacatcagtgccatgacaatggcaaggtccagagccggttcactcatacgcatgccgccggtgatatttacataggcatccagacgggacaattcgtagcggcaccgtttctccagcactgccatcaaaaggtttacacggttgtaatccgtacctgccgctgttcttcttggcataccaaaatttgtctccgctaccagtgcctgaacctccaaaaggataggccttgtgccctctaaggaacaggataccactgctcctgatgcctcctgaggccgtccatccagcatatattcagagggattttctacttccacaagaccctcttcccgcatttcaaatacaccgatctcattggtggaaccaaaacggttctttacgcctcgcaggatcctgtaagaagcatgtctgtccccttcaaagtaaaggactgtatctaccatatgttccaatacccttggacctgccactactccctctttggtcacatgacctactacgaagatggcaattccacggctttttgcgatctgcattaaaacgccggtagactcacgcacctggcttacacttccaggcgcagaggtgatctcttcccggtacatggtctgaatggagtcgatcactacgatctgaggcttttcctgatcgatcacagcctcaatgcgctctaaattcgtctcacttaaaaagcgcagttcccctgtgaccgttccgatcctgtttgccctcattttgatctgttttaatgactcttctccggaaatataaagtaccttctgtccgtctgctgccagatggcggcatacctgcagcaaaagggttgattttccaatacccggatcaccgcctacaagcaccagggaaccggctacaatgccgtctcccaatacccggtccagttccttaaaaccagtggagatccggtcttcctgttccagacgtatttctgaaagaagagcgggtttagccacagctctccccgctcctcgatcagaagacatacgtccttttcctgcagccgaagctgtacctgccaccggttcctctaccagagtgttccatgcccggcaggcgggacactgtcccagccatttggatgactcatatccgcattctttgcagaaaaatgcagttgtctttgcttttgccatattttctatgctctctttactgcctttaccttaacggaagttccttcttctaactctacgctgacgcttaactttccgctcatgttggtcttcatgcttcccacagcagctccgtctacatatacttcgtagtcagtatcattttccagctgaactgtgatctgggcatccttatcgccctctacttcaaactctatactgtcatctgttactttaaaatgttctgctactgtgcccggaacagactcatatacgaacatttcgttgcgctctaattttgtgatttcgttgtaagttttaaccttatagatatctccctggtattcaaaatcggacttctttgacttctgtcctaacttgtaatttccaaaactgatggtgccatcctgctctgtgcggatcaattcttcaacaactggcatctttttatcctcctgctctttatctgtaaattctctggtcgtaccttttcatccggcattcctgtcagactttatgggttttcaccgtattcccagtagatcatttataacgggtatctataattatacaacaattttcataaaataaccagtatattttacgcctttgcctcaggctttgaagcagtatctgctgcctgcgcttttttctttctggctgctgctttcttctttactgtaaaggtaagttttccttcttcacagtcaacttccacatttacacccttcttcagttttccgtccaggatctcttctgccatcttatcttctaacagactctggatggtacggcgcagcggtcttgcaccgtatttatcatcatagcccttgtcgatcagcagatcctttgccgcctcatttacagtaagggtaatgccaagctgttctttgctgcgtttttcaatgcctctcagcataatatccgcaattcccttcatatgctctttcgtcagctgatggaatacgatgatctcgtcaatacgatttaaaaactccggcttgaacaggcgttttacctcttccatcacacggcccttcatgaattcatgatctgcctttgcgtctgtggcaactccgaagccaagacgtttcggtgcgatgatattttcagcacctgcattggaagtcataatgataatggtattcttaaagtcgatctttcttccctgggcatctgtgatgtgtccgtcatctaatacctgcaaaaggatattaaatacatccggatgggccttttcgatctcatcaaacaggatcacgctgtaaggatttctgcgcactttttcactgagctgtccaccctcctcatagcctacatatcctggcggggaaccgatcatcttggaaacactgtgcttttccatgtactcagacatatctaccctgatcagggaactttctgtaccgaacatggcttctgccagtgcctttgaaagttccgtttttcccacaccggtaggtcctaagaataagaaagaaccgatgggacgctttggatcttttaagccgatcctgcctcttcggatggcttttgatacagcggtaacagcctcctcctggcctacgactctttcgtggaggatgccttctaagttctttaaacgctctgactcttcctgtgccagtttcttcaccggaatcttggtccatccggctactacatctgccacttcattttcacctactaccagttttctggtttctttctctttttcccatttttccagagtcaagcggatcttttctttcagtttttcctgttttttcttaatatctcctgccttttcataggcctcatcacggatcgcagactctttttcttcttccagatcatcgatctgtgcctcgtaatccttgatcttggacggctttgtataatttgacaggcgtactttggaagctgcctcatcgatcaggtcaatggccttatccggcaggaaacggtcattgatatagcggctggaaagctttacagctgcctctaaggcatcatctgtgatctctaccctgtgatgttcctcataacggcttctcagcccctttaaaatggcaatggactcttcttctgaaggctcgtccacagtaaccggctggaaccggcgctctaaggcagagtctttttctatatattttctgtattcgttaatggtagtagcaccgatcagctgcagttcccctcttgcaagggacggctttaagatattggatgcatccagagcaccctctgcaccgccagcacctataatggtgtggatctcatcaataaaaagaaggacgtcttttgcttctactacctctgcgatcactttcttaatgcgctcttcaaattcgcctctgtacttggaacctgccaccataccggaaaggtccagagtcataactctcttatccgcaatggtatccggcacatcccctgctgcaattctctgggcaagtccttctactactgcggtctttcctactcccggctctccgatcagacacggattattcttagtacggcggcttaagatctggatcactctctggatctcatgttccctgccgatcacaggatctaactttccatccagtgccatctgggtcagattgcggctgtagctgtcaagggccggtgtggaacttccccgttttccggaatttccacgctgcatctcatctttaatagaaggcgcatcttcacccatagctgccagaaggtcaatatataatttctgtacactgatccccattgtatttaaaagacggcttgccacacagtctccttctcttaaaatagcgatcagaatgtgttctgtaccgatctgtgctgccttaaagcgtactgcttccctataactgttttctattaccctgcgggctcttggggtataggctgcattttctgccatctgtacagaagtatttggggagatcagctggctgactaattctactacctttgactcctcaaccccattttcctctaagaccctggctgcaacgccggttccttcctgtaaaaggccgatcagcagatgctcggttcccacataaccgtggtttaagctttctgccattcctactgccaggcttaaggcctctttcgcctgcggtgtatatcgttccattgttgtcctcctttatgtccctgtgcatttcaaaaatccatctgtcagctgcatatctgaggtaaatgttccctgatataagctgctcttacacagtccgtctcttctttgtccaaaggcctgctggcccacagatttaagttggccggtttgatacctaccaaaagactgtacagactttcttctttctcaaaagagatcagtccgtctgtctctccggagatcagctgtccaataaataccctggcatctttttctgccattttccgcgcatactttaaaacaccataggatttatacgtctcgtcttcccgctccagctttctggcatttaaagcggcttttctcactttctgttcctgactgtttaactggacagctgctttgtttaccagctcaatgatctcccgttctgacagtcctaaggttctctggtttgacagttcgtacatattgcctgcattttcactgccttccccgaaaagtccccgtatggacgttcccagtcttcccatatctgccacgatcccctgaaatttcttcagctgggacagcataggcaggtggatcaccacgcaggccttaagtcctgttcccatattggtagggaacgtggtcagataaccatatttttcatcataggcataagggaaatgttcattgatcctgtcgtctgcagcatctgctttctgccacagcttttcaaggcacagaccaggtgccaaaaactgcatccttatatggtcatctgctcccagtaaaatactttctgactcgtcttctgacaggtacagtccctgtgcgtatgttttttccactgcacagcggtttaagatccgccgttcccttaaggctttcttttctgcctgctgcatattttccagagcatagtagggataagggatctcttttaaaccgtcttttaagccgtctaccagctccctgcttccttcttcgtccagtctggaaggaaatacatattcatcccagtttcttgcaaggcggatcctgctgtatataatattggacttttcttccaatgttttctcataccatttactcatgcacttcgccgccctttcctgcctttaatgcccggatctgatcccggcatgcagctgctgtttcataatcttctttttccagggcttcttttaatcttcgctccagctgcgttatctctttcatgccttccggctgctcttttgcggcattctctcctgctttctgcaaaacatcagccggtaccatctcttcattgttttcagaaatggtttcctgtgccctctgatattttggctgttttcccctgtggctttcactgccctggagctgcttgatcttatcattgataaaaagatcaaaaacgccatagcagtccggacagccgaagcggctgttttgaacaaaatcatcaaaactggtaccgcaggtaggacacaccaccctggaacgttcatcggtttcttcttcatcttcctccaaccctaaaagtccggaaagcagttttcccagcgggaattctccgtctaacaaagccgtatactgtccaaaatcaatttccttcgcacagtgggagcagagattatgctccgtttttactccgttaatgatctctgtatatttaatattcgcttcccgtactttgcatttttcacataacatattaatcctcccgggcctcacgcttcgtatatctgtcatagatctcatctaccagctgatgcgcttcctccctggaaacatccctgcagatcccgcaggcaagcactacatccagattttgacgcatctcatcgatggcctggatcttatccacatccagggaaactacagcccctctgcggcggtccagtttcacaaacccttcctggcgcagaacagaatacgctttatttactgtatgcatattaatgccgatatgatctgccatctgtcgcacagaaggtaaggtatccccttcccggatcatatctgtagcaatccccatgatgatctggttgcgcagctggatatagattgcttcatcgctgttaaaatcaattttcagtatcataaacccaccaactttcaggggctgccgctacaaaatctttgtctgcggcagccccactgtttttatctgctaagttatatctgttctaataataatataacaactttttttgcatccgtcaagaagttttatctcttttgatcaggcgcctcatggcatctgctgctacacgcactgcctgctccgtatcatggcattggatatcctcaagtcctttagcccgccttgtctggtttcccagtactaaaaggaccgttcccacgcggactctccttgctgctgccacaacaaacagagcagctgactccatctcactggcaagagcgccacagtcaagccacgcctgccattttgactttaattcccctcttacgggcatactgtccggatctaactggccataaaaagagtctttgcagtggacaactcctgtatggaacctctggccatctgcttttgctgcctctgccagggcatttacaacctgaaaatccgccactgccggaaattcaacaggcgcgtactgaagcccggtgccttccatacggatcgcaccggtagcgatcaccagatcaccgcccagtacattttcctctataccaccgcaggttcccacacggataaagcactcagcgccgcagtggatcagttcttccattgcgatggcagcagacgggcccccgatgcctgtactgcacacacttactttctctccttccaatgtacctgtataaatggtatattccctgtttgaagcaacaaatctgggatcttctaaatatctggcaatcttctcacatctgcccggatcacctggcaggatcacataccgtcctacatctcccggacgtatttttaaatgatattcctcgtttcctacactgtatgcaactggcataataatccctcctgttgtatccataaattttctgtttttattgtaccacacccctatatcgtctgtcaaattctccggttgtcccagaacttttctgcttcttttaaaacgatttccaaaatagcgtcgatctcatgaaaatcatacaccggacagtctgacatagactctgcatcaaatccggaccatgtatccggcctgaaatctgtaacatacgcctttacagtctcttttctgcacacagctttttttgaaacatcacggcgcatcacttctattttggcataatgggagtctttcagtccttccaccaggatcagatccatatcctgaaaaaaaggcaaaaaatcttctgcctcatggcccttttcctcttttaccagacagaaacgattttccgaatagactaacgttcccactgcccccgctgctttgtgacggtaactgtctgttcccggtacatccggcacaaaatcatggccatcgtgtttgatcacagccaccctaagcccgcgcacggaaaattcccggactaaagtttccgtaagagtcgtcttgcccgtatttttctttccgctgactgcaaataccggtgttttcaagcatgtaagttctcctaatgcctggggagtattcacatttaaaaaccaccggtcaggtacatgttcgttttctgtttctaaaacctttacctgcagttttcctaacagatcacgtactttcccatttttttccaaaagttgtttttcaagaaccggcagacatctggctgaataccagccgcacactggatgaatccgcccgtctcttgttttccagatcacagcatcccatttatctcctgcttccataagagcgcgtttccccagataagatgcaaataagggcatatcgcaggaaacaaaaaacagtccatcaagaccggtctgttttaaacaggaatagatccctcctaaaggtccggcctctgggatcagatcagggattgccctgggatccgggcttttttttgcctctgatacaaaaaccggcaatcccagctgctccagttctcctttgatccgttcttcaaaactttttcccctgtaaagaagcttggctttatcacttccgcccatacggctggactttccgcctttaagcaggacacatccatactgttccattttcattttccttctctttatcatgaaatacgtacacctggaaatctttcgttattttccaatatccaggtgtaaaaaagcaggaagccatatatcccgcttcctgcctttttattttctaatgtacttacaagatcttactgtaaagatgcaacaatagcatctgccagtgcctctaactgtgcatcctgctcatcctttaaagcagatttaacagtgacaatctgctctaaaatgttcatgttcttcatgccggaaaggatctctttcatctgctttcctgcaacaacaccccaggtaccattttcgatcacagctacagtacggttctgcagtccatgtgcctttaagtcatttaaaacatgttccatattggtaaagatgccgccattataggtagctgctgcaaataccagatggctgcagcggaatgcttcgcttacgatctgggatggatgggttgcagatacatcataaactgcaatatttctcacacccttgtcagccagcttgcatgccaggatattggctgcgttttccgtatttccgtaaatagaaccataggcgatcataacactcttttcttccggtgcatagctgctccaggttaagtatttatctacataccagctgatattttcacgccatacaggtccatgtagcgggcagatggtagcgatctccagtcctgctgctttcttaagcagtgtctgtacctgcatgccatactttccaacgatattggtataatatcttcttgcatcatccaaccagtcacgctcaaagtttacttcatctgcaaacaggttgccattcatggcgccgaaagtaccaaaagcatctgcggagaataaagtcttgtctgtggtatcgtaagtaaccataacttccggccagtgtaccattggtgccattacaaatgtaaggttatgcttaccggtgcagagagtatctccttcttttactactacggatctggagtcaatatcaagatcaaagaactgcttgataataccaactgtctttgcattgcatacgatctttgcttccggatgcttttctgcgatctgtcctaaggttgcagcatggtctggttccatgtggtctactacgatataatctaatggacggccgtctaaaacctttgccaggttctcataaaactgtcctgctactgcccagtctactgtatcaaaaagaaccgtcttttcatctaacaaaacataggcattataggaaacacctcttgggatcgggtatgcattttcaaacagagccagacgtctgtctgtacctcctacccagaataaatcttcttttactttttttacacaatacatcgcttatcatcctttctgttcctatttgtcaggcagcccattcctgactttcagggccgcctggttgtttaagcgttacattttacaggtcaaatacctcaaaatcatcttcttctttttcgttctggtcttcagaagtttcttcggatccggcaggttctttttcttcttcctgctcttccacctcgtctatatccagatcttcaaagtcaaagtcttctatatcatcttcttccagatcttcatcctctgtatcctcttttggattttctttttcattttcatctacagagtcttcctctggctcgtcctcttccggttccttatcatctgcatcatccagatcctcaaactggaagtcatcctcgtcctggtcgtctacttcttccagatcatcttccggttcgtcttcaggctcttccacctcttcgccataaagatcgtcctcgtcctcatcttcctcttttacaggtttcttttcagaacgggctgtctttttctctgctgaagaagatttctttttcttacctgtaacagatacgatgagaagtaccataaagatcagtgctacaacgatggcagcgatcagcagtgtcctgaacaggctgtagtcatttcttaaggagtcatacttgtctgccagctgtgtataaacttcctcacttactgctccctgagcagccgggtcttcaaagtaacgctgaatggtacgctcattattatttaagtcatagcggtagaaattcttctcgccagcttcattcatagcgtagatcacgcaatactgatgctctgtttcattgccccatacccagccttttacagcatgtccgtcaatggtaatggctgtttccaccagtccttccggtacctgtacagaagcatccggtgccatcactgtaaagctgcgtctggatacagtcatctggaactgttcaaagctttcttcaccagttccatcctgtgtactttcatttggaccgccttcctgcttggtgacaacgatcacatattcctttgtagtttctccgtcctgggcagttacttttaaagtaactctgttttcacccatctggagattttcattgccgcttaccaccttggaagcgccttcatctgtagtatctgcactgatgatcagtttatccacatcggttcctacggtaactgcataggagtctacatcagaagaaaattccggtgtcaggcttcccggggatacctgaagggattttaagcttgcgtccttggaagcgcttgataaagcactgactgttacctgggactcaccctgtttgtctacggttacgatctgggaagacgcatcgtagatctcctggctggtaactgtaatcttgctggttcctgctgcagatgccttaaactttaagtcataggcaagggtggtggtatttgcgccaccgccgtcaccatgaacacggactgctccatttccgccttctgcattggttccttctatgaattccaggcttcccggatcatatgccagcatgatatccgctgtagaaaggttatcactgctggtgatcttcatttttacattgatctcactgcctacagatgcggtaggatctgaaaaagcgatccttgcagtagctgcaaacgccgtcattccgtataatggcaaaaataaggttaatagacagatggctgcaactgcggctgcccaccgtctgatctgtttgattgtcatattcattcctgctttcctgtttttttactgcacattcacaatggtcacattgctgcctccaggtgtctggctgcttcccgtgtcacctggtcctccactgcttccgcccggacttgccggactggaagaggaactgctgtttgaagaatttgctgatcccgtgccggaaggtgtgtttcctcctgactgacgtactacgtggatactgtatgtccttgtgcttccattctgagctgtaacagtaatagtaatatcactggaattaccagtaagttctgtatttccggtacctgcaacggatgccttgccgtctgctgctgtagcgctgatctgaaggctggtcacagaagtatctacgatcagattgtagcttgttgtatccttgctgaaggaaggagttaagctgaaaccatctgcactcagaccagaaagtttgttgttaggacttccgtctcctgtaggcgcgctgcatgcctgtgccggcatgttgttaaatacagggatctggaattccagggcagaactctttaaggaactgtatgccttggaaaggcgctctgcttctgaggctgctccctgtacattgctcatgtactgatgtttataaggattggatccctgcacattgaactttttaaggtaaaatgtattctgccctgcttttacatagttgtcaccataattctgggcaccgcctaaaatggatttttctactgtattccatggtcttccataactgccggactgacttgcataccgcagtcccatctgggttgcagacatggaaccggactgataggcttctacgttaaagaagttatagtaaccggaatatccggaataattacctgagatcagcggtgttccgccattggttccctgctcctgaaggatcatggcagctaaaacataaggacttacgccggactgcgctgctgcatccataaggatatccacatagctcttgcttccagatgagccggaagaaggacttgttgtctggccggaaggactggaagaactgttatcagtggttacagttccaggctgtgaactgcctgtgctatttatcgtgccatcagactgtcccggagctaccaggcttacattggaagttaccaggttatgctcctttggtgtaatagacgcatgaggcgcttccagacttacatttccatctcctgtactgctttctgtactgtttcccgaaccggaactgcttcccggtgcctgggtgcttacatcattgctgccggatgtagtgctgctctcaccagaagaactgctgccggaagggctgcctcctgccacaccaggtccatgatttgtatcacctgttgcaccgtttcttcctcccggtccctcctgtgaaacagaactggaagaactgccggaagagctgctgcctcctggtgtagaagaaccgccggaagaagaacttccccctgttccggtggagtctgttgttccggaaaggaaggagccggaaaccattcctgtaaggccctcttttgtctgtgtgcttccatcatattcatgggaaaggaactggaatacataggtatcatctaaaaagtttcttgggtccatgtaataacggataatgtcctgggaagctgctacccagttgctgccgtcaaagccggtccaggtactgttatcccagttataggcaccgctttctacggatttccaggaagaaatgcttcctgttgcaaccaggtttcgacccaggaccgactcattttcaatggccgtattccagtcgatccctgtatttttcgcccggaatacccagtttggatactgggcatgaagctgtcttaaaccatccttataactttccggaaatccctgggaagtcagataggactcaaagcttgcatctgtagaataggaaacagggagtcttatgtaagcggcggatacataacctgtacctgcctgaccgttactgcctgtgtactggatccggtaccaggtctttccatcagttccctttttttctcctgtgatctggatgctggctcctgctgccagacgggccactgcactgtaaccggttcctgcatcacttcttacatttaaagaggacgccttgactgtagccgcccccgtataagcataggaatccaacatgtggatggacaacgggctggtcaccggaaggttggccgccagtgtcaggcctaacaggactgccagaccttttttgtatatttttcccttcatcttgctgtattatctcctgaattttctgtatctcatgataccagattgctacgcactttgtgctctcgcaatcttcaaaaccattagtaatccgctcattttttgcaaaaatggctacttactcatgtttttgcgtgtcccaagataaaaaatcctcctgcaagcaggcttgcgtcggatttttacctttcgacactggtatcattataatgatatttactccttaatgtcaaccgcaacaaaaaatgttcacacaaatcaaactaattcgtaagaaaactttaacacttgtggacccacagaccaaaaatatgttccagcgttccccaaaaagtcatttttgtgatctggcggtcactgtataagggaatttcccttagcaattccccttctacataataacaaacccgtcctatcttctgcccttcttttacaggagcctgcagctgctttggcaggaacaccttttttttctgtttttcctctttttttaccagagcataaacatgtttttcctctgatcgtaaatcttcccttgccagcacatggtcctgaggctgctctccccagcagatgccgccatctacttttacaggcaatggctctgttttttggcagcgttcatacagatctgttttctcataattttccattccataggaaagaaggcttctggcatctgaccatttccaggttttatgaggaggccagccacagcctaacagggcaatgataaaaagttttccatttttttccagcgcaccaacataagaataacctgcgcccccagtaaaaccggtctttcctgtaagggccccgtccatcatatccaaaagagcattgtgattgcggcactggatctgccttttattttccagatcataaaatccatggttctgggtcctggttatctttaaaaactcctcttttttcggcgactcctgtatacagtataataagatccttgccagatcttttgctgtagtggaatgggtatgtatttctcccttttcatctgtttcctgggcgtctaaaccattgggggtaataaaccaggtatccttacagcctaactccctggctttttcattcatcatagctgcaaaaccttctcttgtaccgcctataaattccgcgatcatcacagctgcatcattataagactccagcatcaggccatacagcaggtcctttaaacggtactgctccccttttcttactcccatacggactttaggctgggaggctgcataagaagaggcacttacccattcttccgtttttccattttcaagggcaaggatacaggtcatgatcttcgtggtgctggccatgggacggatctgttctgcattttttccatataagatgcgtccgcttaaaccatccataagcacgacggactgggaatacaggcggagttcttcctgttcctgggccttaacaggaaaactttgaaatatcagccccagaaacagtgttaaaaacagaagccataaccatacaggcctgatcttttttctcatccattttctccctggagcatttatgtactctcaaaatcttatttcatcctattcccattttcctgcagatatgcaataacctgcaccggaagcttttgacgaaccttttaggctgtgttatgatttacaggaaacttaaaacagataaacgatctaacaaagatcatgaagggaatacagacaatcgatgatcaaaaagacattacaatataaaataacagaaaaggaccagggaaagaccgtagaacagtttttaagaagcaaaggttattcccaccgtctggtggtaaaactgcggaattctcctaccggccttaccatcgggggagagcttgcatttaccatccacaggctccaggcaggtgagatacttattgctactttagaggaggaaaattctcagaatattgtccctgtagaacttcctttaaatattgtttacgaagatgaagatattttagtggtaaataaagatgccggtgtacccatccacccttcccagggccattttgaccacacgctggcaaatgcagttgcctggtattaccagagcaaaggccagaccttagtctaccgggcgatcaaccgcttagaccgggataccaccggccttttagtgatcgctaaacatcttttagctggctgcatcctttcagaccagatgcttaacaggcagatccacagacagtaccgggcaattgtctgcggaaaaacagaaaaagagggcatcattgatgcccccattggacgggctgaagactctaccgtccttcggcgtattgactttgaacatggtgagacagccaggacccgttaccgcctgctctcttatgatgaagaaaaggatctttcctatatcagccttaaattagatacggggcggacccaccagatccgtgtccatatgagttatattggccacccccttcccggagatttcctctataacccggactaccgttatatcagccgccagccccttcactcttatggtctggagtttatccatccccttaccggagagcctttaagctttacggcccatctgcctgcggatatggcagctttggtaaaagagccggaacttacatccaccgaaggcctttgggataatgatttttaatggtcccggcagccatcttgccccagccaagacttacatttcctgtacagatcaatacccagcctttttcacagggagcagacataccggtatcaccgatcagtgtctccccctttaaatatttcactgcctctgttccatctggttctacttctttttgtacttttgcatcttccggaaacagccacaatgccagggcatgagatggttcaaagcggttctttttaatggttccaatatgaagccccggacgcagcactttcagtccttttaaacttaccatctgaggcggcagcagatacagctggtccccaaaacgcagatattcttttctttttttcagtacttccggctctgtcagtgtctcctccagaaaacggtgcagttcttttaacacatctttttcttttttcagatccatataagcaggcaggcttctttttcctgaaaagcccataccgtcttctttgcggcggagcactgccataaaatggccttctccctctgtcttatggggcataatgcggaacgcacgttccagatgatacttttcaattccgttctctcctgccaggtcccgttcagagtcatcttccttatctgctccaaaaaaggcccactgcggcactgcagccataagccctttggggcattctctctcttccaggtaaaaatcatcatggctctttaaaaaggcaagaatggtcccttcattttcttccggcgcaaaagtacaggtagaatagaccatggttccccctggttttaacatagaagctgcatcttctaagatctctctctgacgggcagcgcacatttttacatggtcctcgctccactgtctgactgcttcttcctctttacggaacattccctctccggaacagggagcatctactgcaatccggtcaaaaaactgaggaaagactttcgcaaggcttgctgcatcttcatttgtgactacgcagtttccaactcccatgcgctccatattctgggaaagtatctttgccctgcccggatggatctcatttgataaaagaaagccttctccttttaaacgggatgcaatatggctggactttccgccgggagctgcacacagatccaatacattttcccctggtttcggatttaaaaactctactacggacatggcacttggctcctggatatagtaaagtcctgcttcatggaacgggtgtttgccaggtcttgcatctaacgggtaataataaccttcttttacccagggaaccggcgttaattccatatttaagagttttgcggtttctgctgccagagtctttacccctgcttcttcccagtcaggttctcttccctcttttgtctttaaactgttaaaccgcagtccctgtaccttttcctgctcatagctggcttcaaatgcttcatattcatttccaagcagttccctcatgcgctctttaaagcgttgtggcagttctgtcatcccattgtttcctttctttgtcaaattacgagtttatcagattatgttacaaacaggaaaaggccggcaggtctatccgcccaccagcctttttcataatttctgttctaaaagatttttcgattacagcataaccttgaagtcgtcagatgcttcaccgtttactacatagtaagctgcgccctcttctgcaactatgtaaagctcaactttcttgatctctacatctttgtgagtgctcttgtatgcttctacagcctgatctaatacgctcttagcaaggatatccttaccagcgaactggaaatgtacttccatctttggctcaactgccttctttgcagttgttctcttagctgcaggcttctttgcaggagccttcttaacagcttcctttgcctctgctgcaactgcctttacagtagctgctgcttcttttacagtctcctttactactggagctacctcttttgcggtttcttttacattttcttttactgcagatgttttagctgccttcttagccattgtcataattcattcctccctggttggatctgggatatccggagtccaactccgaaatccgtctttatttcgttctatgtatgttcgtcctcgttgtgtcaaaacgcattatagaatggtttttgcgatttgtcaacgttttctgccatcagacccctggtccgatctcctctgcaggagcttctgtggtaaacgcaggccccacttcttttgtggcattctccgccggagaggtggtttctatcggctgtacaatagcagactcggaaggtgcctgggtcggtgcagcagtctctggtgcctttgtggtctctcccggtcccgcagggtctgtagcaggtgcctgagtctctgcctgctgggtctgggacggtgcctgggtcggctgtgctgccgttgttggctgtgcaggtactgctgtgtcatcctttcctgaagccttggaagactgggcattttccgttcctgccaggttataacagatgaccggcataccggcatacacattttcaaataaagttttggctgctgcatatggcatatttacacaaccatgggagccattctttttgtaaatagtgccgccaaaggtatttctccagctggcatcatggaaaccgataccgccgttaaatggcatccagaactttacaggacttgcatacccctgtccctttaaggttgcatccctctgcttgtaagtcaggctgaacagtcccggaggcgtggtatatccctttgaaacatttccggatacaaaatcagactccaggatcttctttccatctttgtaaaaatacatatgctgggccgttaaatttacctctgcataggtatttccataatcattgccatcatggctggccgctttctgggcataggcaggttcctttgtaacattttttccctctgcaagggcttcttttaatgcagctgcctctgcctgctggtcaatacgccagccataaacaccgcttacctctacttccggtccataactggtcttaaaggtacgttttgtatatgcagtattgtatttggatgccagggactttacatattcagagatctttccttcatccactgtgacctgaccatctgaataagaaagccaggtatggatctgctcaccgtccaggatctcattcttgctccccatggtataagtgactgtcatatttacataatggttcaggctgtcagccatagctgtaaggctttcatcatctgagcggacagcaggctcttcatagcagcccagctcatccagatcgatctcttctttcagatcgttaatagccgcctttacttcttcctttactttttcaggatttaactggtctccttctgtctcaggaataacagaatagccttctccttttatatagtctgataaatgagcattctccggcgcagtcacatgagccggatccatggcatttaagctgtctactgcctgatcaagagcctcatcctcataagccagcatagtctcgatctcataattttccccttttatcatatgaatgggccaggtataaggattttgctgcttaaggatgttttcaagacttccatcaaatacagtattaagcccaatggcacttccctctatattctcagacgcatcatttctcaacaccaggcgcagggaataatcgcctgcctcctttgccatagcttcttctactgctttaggactcattcctgctgcattcattccattaatgcaggtacctggaaggtatgtattctggtatttcatagacatacccacatatccggctgcaccggttattactacacctgccagtattcccgctgcaagcttccaggaaaatggctttttctctgtttcctgtgtttcattttcctgtgtttcattttcatctgccaggttttcttccatgacagccttggccttttctctttccgctctttctttttcttttctttcccgctccctttctttaaaagccgacttactgcggcttacaggaatctttttttcttttttttccatatcttttatataaaaaacctttctgacattgtcatttttcattcatgaatgctttcaggatatctgtcagctcctttaggctgtccgtgatatttctaaaggctccataattatacaggctcacaaaaaacataccacagggtactgccaggatcattcctgcaataccttttaatttaaaacctaaatacaggaatagcagggtcaatatggggtttaatcccagactgtctcctactaacttaggctgtactacctggcggatcacctgggtaagtacataaataagcagaagccctgctgcaaaggcatattcccctcccagcagcttaatgatcccccatggaaacagagctgttcctgctccaaataccggaagaaaatctaaaaatgcaatgagaaatccccataacaggctatattttactccaagtatgaaaaatcccactgtcagtattatccataccactgccataattttgaactgggcagtaaaatagcattcgatcagacgtcgggcctctgtccttatatactggctgtatttttttgcccagtcaggcatatggcttcttacaaaagccaggatccggtctctgtctgcaataaaaaaataagctgacagaatagtaacaacagagtacaccataagcgaggggatcattttcgccactgcccctgctgcctctactgtaggcggggcaatggaacctgccagctttcctaccagttcccccagattatttcccagtttttcccagcctgtcctgatgcctgcaggtgcataggcaaacagattttccaaatgggtcaggctttcctgaacttccgcttcgatccctgcatataagtcaggcaggtctttcataaaagaccacaaaagcctggcaccatttgacacagccagataaataaggccaatgaccagagccagggctccggctacaatgaccatggaactgtgttttcgcaccaggcatagctttctctcaagaaaacgcaccagcggattggccagcatggagatcagccagccgatcacaaagggcataaaaaatttcaaacacctgggtccgaaaaagcataaaagaaaccatccggacgcaggcagcaggatctttagtatcagacgcaggatatgtttatccattcactcatcttcctttcaggcattgggtaaatatgcttccaaaaagcggaataatgtatccatttcttcatctgttcctatagaaatacgaagactgttgtccagaccaggtgttttaaaatagcgcacatagatctgttctttcttcaatgcctcaaagatcttttctgccggaacggacttatgagaagcgaaaataaaatttgactgggaattggggaaggtaaatcccagttctgtaagacgcttctttgcatgttccctggtagctacgatcttttcaattgtcttttcaaaatattccttatcctttactgcttccacacctgctaagagagatggaaggttcatggtataggaattataagagtattttacatcatttaaagcgcggatcagatccggatgtcccattgcaaaaccaatacgcatacctgccatggagcgggacttgctgaaagtctggactactaaaagattttcatatttatccagaagttccagtgcggaaggccctgcaaaatccacataagcctcatctacgatcactaccacatcctgatttgcctttaagatctcttctacctgatccagtggcatatatacacctgttggcgcatttggatttgggaagatcacaccgccgttttccttttcataatcttttacatcaatggtaaaatcttcttttaaaacaggtgtctcaaacggtactttaaaaagatccgcccatactttatagaaagaataggtcacatccgggaaaagcaccggtttatctgagttgaagaaagtaagaaatgacatggcaagtacatcatctgaacctactcccacgaaaacctgatcctcgtttaatccataataagaagccagttccttaactaaaatggacgctgtaggatccggatacttacgtaaacggtctgcttccatctcttctaagaccttttttacacctggcgccggtggatatggattttcatttgtattcaatttaacgatcttatcacctgcaggctgttctcccggtacataaggaactacctgacggatgtttttttcccatggtctcataagcttagctctcctctcacatttgcttctcttgattttatccttgatacccccgattgtcaatatagaagaagcgttgttttttcttacattttaatgtatactttcagtaatgattttatctcagatcgcaaaaaagctttcttaaaaaatgttttaaaaatctaaatcaaagaaggtgtacttatgaacgtatttgacatacttggtcctgttatgatcggtccttccagctcccatactgccggcgctgccaggatcggccgtattacaaggacactccttggagctcctgctgtaaaagcagatatcctccttcacggttcctttgcaaaaacctacaaaggccatggtacagacaaggcactgatcgccggaatcatgggaatggctactgatgatgtgcgtatccgacaggctccggaactggcaaaagaagccggcctggaagtacacatttccacaggtgacattgacggcgcccatccaaatactgcaaaagttacattgacagatgccaacggacggcaggtttctcttctgggttccagtatcggaggcggaaatatcctggtaacggaagtcaatggtatggaagtttcccttaccggacagtatacgactctgatcgtccttcacaaagatgctcccggcaccattgccgctgttacagaagtcatggcagaagaaggcatcaacatctgcaatttccgtctttccagacagaaaaaaggcggcgaggcggttatgaccattgaactggacggaaaaccaagtcctgagatcaataagaagatcaatacgcttcccaatatctattccagcactatgctgcagcctatctgataaagagaacattaaatcttaaggaggtttctttacatcatgaatactgattttaactactcttctgttgcctccctgatccaggctgcagaaaaaaataatcttcccgtttcagccctggtgctgagccagcaggcacagcagatagaactggacgaaaagaccgtatatgaaaaaatggcttctaatttccaggttatgaaggaatgtatcgaacctggctgtgatgaacacttaaaaagtaccagtggacttacaggaggcgatgcctttaagctgcgccggtacagtgaaagcggcaaaagccttaccggttccttcctttccggtgctctctaccgggcactggctgtctctgaattaaacgcttccatgggccgtatcgtagctgctcctactgccggaagctgcggcatccttccagctgccctgatcaccatgcaggaagagaaaggatgttctgaccacgactgcgtaatggcactttttacagcctctgccgttggtatggtcattgcaaacaatgcctctttagcaggcgcccagggcggatgtcaggctgagtgcggttctgctgctgccatggctgctgctgctatcacagagctggctggcggaactccccatatggtctcccaggcagttgccattgccttaaaaaatatccttggccttgtatgtgacccggtagcaggtctggtggagatcccctgtatcaagcgcaatgcttccggtgtagccggtgcctttgttgctgcggaaatggctcttgcaggcattgacagtgcgatcccggctgacgaggtgatctggtccatgaagcggatcggcgatgttatgtcacctaccttaaaagaaacagcagaaggcggattagccgccacaccaacaggaagaaagcttcacgaccaggtattcggtcctggcaacgtttccggcggatgcagcggctgttccggctgtcattcataaattttcatggttatctggctatagaccggataactgcattttattaaaaagctacaggaattcctgtaaataactcttttcccctggaagtcagtttttcaaggtctaagttgctcctgatctggcttccatttttcattgtcacgtagacaaacagatcttcatctccattaaaactgctgcaaagaccattattctctgctaaagagctttcctggcaggcgccgatcagctctgcgatctcctcagaatctgtaatatccagacgtccctgttcagaataatgaggattttcttcttttagcttttctaattcatctccctgaggaagtcttatggcaccttcttcacctacatataggctttgcaggtcgatccttatgctctggatattttttgccgtcatataacttcccggcacaacggactgcttctttaaaacttccattgtattcttaaaagaaggataaactggccaggaaacacagtaatcatctgctatatcataagtataatcaccgtcataataatatccggactcaaacccgcctgccataacatttacaggcatctccataacctctttccagtagccctgctgctgtaagaaagcggccatattgttatctataaacaccaggcttcctaccggatcttcctgtcttctgtctgccacagtctgagtcagaaggtctgcctggtatgcctttaacacctcttctgctactgcgctgtcctgtgtctgataccagatacttcctgcttctttgtagactactttggaaagttctcctgtgttctcttcaaaaacaggatacagaccctttttgtattcttctgaagcatacagagtatcataggcactcataatgctgtttaaagatacattataacatcttcccacctgtttaccgttttttaagttgtaaaatacattcacagaaatcgtaatatctttctctaaaggatcactttcaccggaacccacttttccggcaacaaagatggatgtaggaccgtcagccccgccgatcacagaaaccgcatttgctgcggcagtttcctggaccacaagacctgatgttcttgccacggatattccataaaactggtcaaaacgagttttccgttcctgggcagcctgggttacgcctgcttctgctatagtaagtactgtatccatgtctgtcagctgcatatggttctgtacaaaatcaatattgctggtatgtttaactacccacttaccgtcttcttccactgcatgtgcataccagtttaagaagttttcatcaatagaaagttccagacctgctgatgcgatctttccttcttccgggataaaacggtcatagccataccaatcatagcggaaggataagaaaaacaggacacctgctgccacacagcccatcagctgtattttatgggaaaacagcttcttaaaatcagcctggtaaatgatctcaataatgcagtgggctaaaaggatgccaacaaccattccaaagagtccccagcgcagacggctctgtaaagtccagaaaaacatggaggttcccataccagctgcaaggacaataaggatacggatgggtgccatggtctttttaaaggccattgcctttcctgctgcttccataggacgttttctgtaaagttccagtcccaggattgctcctgcacaaatagcgatcaaaagtcccaggatctgatctgcctccactgtctttccagcggagatatctgccagagacataatgtacgcgcctacaggggataaatgacccagtgtattaaaaagcgcttcatttggcacctggttggccgtaatgaaaaatatgtcttcaaagccctcgatcagagcaccaactaccggaaagaaactgaaaaatacaaccgtagctaaaagtcccactatgatctttcccgtcatcatcattgccacaataacggtctcataggtcaccatgtaatacagcaggttcatgaaaaagccaaagagcataggtcctgcaaattttgccgggcttacgccgtatgcagcagctgccgctgtaagcactaaaagatggataagataggtgactgccagtatgaggataccatctacatgatataccagatacaacatttcccttcttacaggaaggctgtggtaaaaatctaccttcttctggttgtgaagataaacaaaaccggctgcaccgatcactaccgctgctgttaccattaaaaataatggcataacatttccataggaaaccagatccactaccgcctttgttttatattccagcacttttgccaggtattccggtgttccggtatctaccagaggcgtatatccgttgtacatggcaaactggctgtttgctgcgttttccatgatcagcgccagatttacaggataggcaaagaaaaatcctaaaaacaacagggcaatgacccagatcctgcgctttaagtcttctttttgcagtttaaaaaataagcttgcggatgtcataacctgccacctccgtttcactgatgaatatttcctctaaggacagagggatacactcaaaaaatactggctcataccggttcataatgtcctctgcttcctgttttgtgcctcttactgtaagggtaagaagccgtcctcttccttcctgtgaaaggatctgaagtccctttaagtcatctgccgtcattccttcttttaatacacactggatcttatggatatttaacttcatatcatctaaatccttagaaagaaggatgccgcctttgtgcagcagccctacatgatcacagatatcttccagttcccgcaggttgtgggatgcgatcacaggagtcatgttccggtcttcgatctctgctgcgaaaatgctctttactgcctggcgcattaccggatccaggccgtcaaaggtctcatcacagaaaagataatctgtattggaacagatgcccaggatcacagatacctgctttttcatgcccttggaaaaagtgtggatctttctcttttcgtctaagccgaaattacccattaatttatggaaacgggccttgtcaaaacgttcatacacaacgctgtaatattccatcatatcaagaggagaagcattgctgaaaaaatgagcatcgtccggtatatagaaaaactttttctttgcttttatgttttcaaatacctcttctccgtctatggtcacatggccctcatctgctttaaggatcccggctgccagacgcagaaacgtagattttcctgctccgttggttccgataagaccaaatacagaaccgcttttgatctctgcgttaatgtgatccactgctaccagatcgtcaaatttttttgtcaggttcactgccttaagcatctgccttacctccttccctctcttctaagatctttatcatatcctggtaacttacaccaatgcgaagtccctcttctatggctgcgtcaaactgtttttcccagtccttgcgtatcccctctgcaagatatcttccatctgaaacaaaacttccttttccctgaatggaataaatatatccctggcgttctaattctgcgtaggctctctgtatagtattgggattaatagaaagctccgttgccatactgcgcaccgacggcagacggctgtccggcggcaatacgcctgaaaacatcaactcttccagtttttccgtcacctgttcatacagcggacgccggtccctgtaatccagtacgatcatttagcctctctcctttctgtctgttcacctgtaacatatatatgaactgttttgactgtatgaattgtattaactgtactaatcatattgatacagttgtgatacacttaagatagcattatcttatgatttatacaagggtattttttcttaagaatatattacaaagccttcttcactttcagccataataaaaaatatcgcctgtacagtccatttttcatggtcctgttcagacgatatttttcgtaaacttattttatttcatttacatttcccagagttatctgttgatcatccgatcaacttactgatccattaatcttctttaatcttaacgataactttcttgataggtgccggagcgccgttagctgacttcggcttatgtgcatcccatggattgaagatgagatactgaccagcttttacaactacctgcagaccgtctgtggtattctcgaagaatactacgtccttatctggattgtaaggagtctttacagtcatttcatgtgcaggagcgtaggtcataacctcacttccctcgatcacgtactggatatcggtataatgctcatgtgcctcatacttagcctcttcccacggaatagtggtgtaagcggtaacatttgcatatacgtcttttccgtcgatctcatactttccaggctctaatgctgcaagatcggtattctttaagaagtctactgcctttgcgtatcttccctcaatacctaagtttctgtaaaagtccaaattctgtttttcatcaaaaatcatggtctttttctcctttgagtcgttattgacaagtttattgatatttttctatcagtttcctgtctttaccagtatacacccaaagcagcctgaaactcaatccctttcttacagctatttaaaaaaactaattacagtccagccatgacatcttcttgtttccatattcatgaaaacaagaagccttgtggttccaccatatgctggttcgaatgagaaagtgcttatgcaagcaagcttgcaacacactccctcattcaagccagcgcatggctgaactatttaaaaaattcgtgacctccgtgtgcgaaaaggtaggttaatctggagtcaaaccagcctgcttttctgccggaagcttttctgttcataaaatataacgcaccgttggaataatcttccccgtccagtgcacggtccacacaccgaatggtttcagctgttacttttacggaattaatcctgccgttggacaccggctggaactgggaaccctggtatacaacaccctttacgcttccaggaaactttcctgaaagaacgcggttgatgatcacatcggccactaagatcttgcctttctcatcacatacaccagcttctgcctgaacgatccgaagtaatacctgataatcttcatcagacactttgatccttctggcggctcttctctcttcctctgctttccgtcttgcttcagcctcttctttttcttttaatatctgtttctgaagcgcttctatttctatctgcgcatctgcctgcctgcgctgtctgtcccggacatctctctccaacagcgcaccggccagatgctgaccttcactgcctgtgttcaaaagtccgaattgtatttttgcttctgtaacaaaactgcttccttcaaaaagtgcctctgtctccggttcctcatctgcttccagagagtctacggttctgggcgctgccattgcgttctttccgcctccgccaaatccattggctgaaaaagcgactactgcaatcacaacggctcctgacataaggacagaagacgaacggtaatggttctttgtcaccttaacagaaatagaacgtacaaaaaacatcaccgactgaaggaatgaatgccatgtaagcatacatactcctcatattctttcccgaagcatactgcctcgtaaatccgtttcagagcggttaaactgcatccgctcccaagtgccattgtgggatgtagtccccactttatgcctgtttttctgggatgtatcggtaattatatgggattaaatcctaaacgtcaaccattgggtaacaactttgttacgttttatttgtcagtggagatttttgtaaattattttatgcgttttgtatatttatttctttattttatccttcaaatcagcattataacgatttgttttttacgtatttattacatttttgttaataattaattttgttaatttataaacaatgttttttagccatattatgtaaactgttagtggccgcaaacccttgattttacgtgattttatttttcgattttccttgtataattttgtcaaaaaatgggtgtagtccccacttttaacatttttgtaattttttatgtatatccggttatgacaatcatccattaaggaaaacggaaatggctgccacagctctgccctgttattagaacgtttacaaaagcaaaataaaaagagctccagacgatattttcacaccgtctgaagctcttttaaatactgtttttcttaaattacagaataaccttagcagggcactttgccgcgcacttgccgcagtttgtacacttctcgtaatcaatgaatgccaggttgttatccatatggatagcatctgactcacactgcttggtacataaggtacatccgatacatccagcctgacatgcagcctttacatctttgcccttgtcatggctgctgcactgtactaaatgttctgcgctgtaaggaacgatctggatcagtccctttggacaggtagcaacacacttgccgcaggctacgcacttttccttgtctacaacagctacgccgtctacaacatggatcgcgtcaaactgacatgcctttacacaggaaccaaaaccggtacagccgtagctgcaggccttaggaccgccggcaggcactacagatgcctttgcacagtcatcaataccttcgtagttgtaaagagtcttaaccttgtcacaggtacctttacaacgtacaaatgcaaccttcttctctgctgctccggcagatacgccaaggatagcagcgatcttttcgcctacaggtgctccacctacaggacatgcatttgcaggagctttgccctctgcaattgcctttgccaacgcgtcacagcctgcgaaaccgcagccgccgcagttgtttccaggaagttcctcacggatagctacttccttttcatctacttctaccttgaacttctcaccgaaaagtccaaggccgattcctacgatgatacctgctactgcaataactgcagcagcaatcaaaattgctgttatgttcatcttcgtctcctccttctacagtaatccggaaaatccgaaaaatgcgattgccataagacctgcagttaccagtacgataggagatccctggaaattgtatgggatatcatttccctcaatacgctcacggataccagcaaggagcacgatggaaacagtataaccaacagcagttgcaacaccgtttactacactctgtacaaagctgtagccgttctgtacgttagtaagtgcaacacctaatactgcacagttggttgtgatcagcggaaggaatacacctaatgcgttgtacagggaaaccatacatttctttaagaacatttctacgatctgtaccagagccgcaattacaaggataaagacgatggtcttcagataatccagtcctaatgggttcaggacgaactgatagatcagacttgcaacaacggaagcgatggtgataacgaagataaccgcaccgcccatacctgctgctgtctctacctttttagatacgccgacgaaggaacagatgcctaaaaactggcttaataccacgttgctcacaaatgcggagctaatggcaataacaagtaactctttcatccgtttttacctcctattcttccgtctttgattctgcacagtttgcgcaatcgccacagcaagcggtcttagccttcttgcccttagcggaaccgttagttgctgaaggcatctttaacttgttctgtaaagcagttaagcaagccagaacgaagaatgcgccaggtgccaggataaagatggaaataggctgataggaagcaggcataatggctacaccaaagatggaacctgcacctaaaagttcacggacagcaccgatacaaacaagggcgaaggtaaatccaagacccatgcctgctccgtcgaatgcggagatgatcggtttgttcttcatagcaaatgcctctgcacggcctaagattacacagtttacaacgatcagaggaatgtagatacccagtgcgctgtaaagatctggtgtaaagccttccatcagcatgtctacgatggttaccagggaagcaacaactacgatctcacctggaagacggactcttcccgggatgatgcttctcatcagggagataatgaagtttgctgctactaatactacggtagaggaaagacccataccaagaccgttcatagcagatgtagttacagccagtgtaggacacagacctaacatctgaacgaaaataggattttctttccagataccattataaagacgttctgtatacttgttcatttcttacacctcctactttccaacgcagttttccacaaagtaaatagctgcatttgtggcaccggttactgccttggaagtataggtagcgccactgatcgcctgaacctggttatcagctgttgcgtctgtctttgttacttccagtttctgtgctttcattccattgaactgatccttgaaatctggttcttttgccttcataccaagaccaggagtctcgctgatgcttaagaaaccaagaccagtcagatttccctcagaagtgatgcctacagagatctgtaccagaccattgtagccttctgtggaacttgcagtgatcagatatccaagaacagaaccatcttctgcttctgcaacctgtgcatcatcaacagatacatttccaaagccctgagccaggatctcatctgcagatgctgctactgctgctgtcagttcatcggtctgctcaaattttgctgcttccgggaatacttctttataagttttggtagctgctgcttcctgagcctttgcgatcggatctaatgttacttcgtgaactgcgcccaggcaaagtcctgcaactaaagtgatgacaaacaggatggcagcgtcttttaaaattcctttcatgccttctttgcctcctttccaaatgcttttggaagggttacacgctcgatcattggtacaaacaggttgcttaaaatgatcgcataggaaacaccttcaggagaagcaccccacagacggaagataccggttaaaagtcctaagacaacaccgaatacgatctgtcccattggagtgatcgggctggtcacatagtcagttgccataaagaaagcaccgaagataagaccaccaccacatacctggcagagtacataatttacatcaaaaccaccaaagataaatacaaatactgcaactgttccaatgtagatcaccggaattctccaggagattaccttgcggactaacagataaataccgccgatcagaagagcgatggtagaaacttcaccgatggtaccagggatacgtccaatgaacatggaagccagatctacgctctgtccggcacgcatagctgccagaggagttgctccggaaacgctgtcaaatcccaggcttgcagctgagaagttgttcatcatgccagcgaaggaaattaacaggaagcatcttgcagccagagccgggttcataaagttctgtcccagtccgccgtaaagctgctttacaacgatgatcgcaaagataccgcccagtgcaggtacccatacagggatctgaggtggcatgttcagtgccaggatcatacctgtaacaagagcacttccgtctgcaatggtaattggcttgtgcatcagtttttcgtaaacatattcacttgccacacaaactgctgatgtgactaaaagtacaagcagtgcgtggacgccaaaattatatacaccgaaagctgccgcaggaagcatagcgatcactacgtccagcatcaggttctgtgtattcacactgcatctcacatgaggagatgaagatacgtttaataatttattcatagcttttgtcccctcctagcctttcttcctgcggttagccgcaaccgtcttacgcatttccttgaatgcctgggtcagaggacgtcttgcaggacagatatatgtacagcttccgcattccatacattccataccgttgatcttttcaaaggtctcacagtcacggttcatagctgctttcatcatcatgactggaacgatatggcttgggcagacacttacgcagcgtccgcagcggatacatgcagttggttcaaaagctgctacctggtcttttgtaaaacaggttaaagcagaagaagtcttacatacaggcacatctacagtaaacagggcctgtcccatcataggaccaccggagatgatcttttcaggctcggtcttgaaaccgcctgctgcttcgatcagttcctggtaattggttcccagttttacattgaagttctgtggttctgccacagcatcacctgtaatggtaatgatctttctcattaatggagtagacttgcatacagccatataaatagaagcaactgtatctacgttatctacgatacagcctgcatctgccggcagcatggaagaatttaccttgcgtcctgttacagcgtagatgatagaacgctcaccaccctgaggatacttggtaagtaacggacagacagtgatcttgggttcatcctttaccatctctgtcagtttcttaatagcctccggcttgttgttctcgattgcgatcacacccttggcgttatcaaacagctgtaagataaccttcagaccgcctacgatcttctcaggctcttcgatcagcatacgatagtcgctggtcagatatggctcgcactctgcgccgtttacgattacataatcgatcgcattctcatcctttggagtcagctttacgtgagttgggaagcctgcgcctcctaaacctacgattcctgcctcttttacgatagaacggatctcttctttagagagtgtggaaggatctctgtcctctcctactccttctactgtttcatactcaccatcgttttctacgatgatggaaggtaccattgcgccatttaccatacgtcttggttcgattgccttaacagtaccggatacagaacagatcacatttgctgaaataaatccaccggcttctccgatcttctgtccagcaagaaccctgtcaccctttgctaccagtggctttgcaggtgctcctatatgctgagacataggaaataccagttcgccctttggcagaaggacctggatcggtttgttttctgacaattcttttccttcatacggatgaatgccgcctttaaaagtcgccaaacccatggtttcttcccctctttctttttgatttcttttgtttaatggaacaattttagcatgtccctaacagccatttttgagtataacacactttaactttgtatacaatatgaaaagttatcgttatttttttaataattatgttaattttttgataaagttgttagttttgactaacatctttcgtcaaaaataaatttcagaatttctcctatatagcgttctttttttctaaaaaagccctggtgtgtaccccctttgatcaaaaccagacgacttcccgggatgcaccgggcaatgattcgggtatgagactctttgatcagatcatgggttcccgccattaaaagtacgggaacggatatttttttcaatctctcttctgtgagaaaaggggaatgaaggatcaggctgcttaaaaactgctctcttttacaccattttccaaattttcccactggctttatattctctaagatcttcgcacactggaaacgggtattctccataaacagcataggagggatcagaccgtccggcagtgcattggcactgactgcaatgatcttttctgcccgctctggatgatctgcggcaaactccaaagctgtattggcgccatctgaaaatcccaggatcactgccttttctattttcagatgatctaacagacggactacatcttccgccatatccgcagccccggtccatcttctttttcccttttcctgtgagcggcctgtttttaatacagctgcttttaatgccgccattttcatcacagatgccccatgtcccctgctgtccatggcgattacagaacagcctgccttcgtaaggacttctatataagaagaaaaatcccggtgagtgcccctatttccatgaaggagcaccaccggaagtccgacctttccctgtatatcgtattttttatagtataaagatccatcgggaatagcgataaaaccatccctttcctctatctcacctgtttctttttccttttcactcatggtcttttttcgcctctgtttcctgctttttctgtccatgatcccaaaactttggaaattttactgtctggaagaaatcaaggataccctgtgggttctggatcttcaccactgcatagaacatatccggagaagggatcttcggcagatacgcataataagatggttcccagacggtaggactgtatttctcctttgcccggtaaagatctttaaaaccataacactggtttaaatgctcatagacaaactccaaaagcttctccataagactggcattctcttcttttaatccagcaagaggcgctacccccaggctggcatactccacgccttcttccttaaatacctgaaacgcttcatacatgatcagttccataacaccgcctggtgctttctttccatgacgggtcatatctgccatatatccgttctttccaaggaaaggcacaaaaacaatgtaggctaccatgcttccgctttcgtctactgcataaaaataccgccggtccataggatcatccagtcccagagtacccatggtaaattttaacatggaacttttcttaccttccagccactcatcggtaatgcggttaaattctacctctaaagctgcattcctcttctccagtatcttatactcgtaaacatcgatccccgcttttttcgcatgattgatgttcatacgcatcttggcgccttttttaccgctgatctcatagtcagccagcttaaatctcgcctcttccccgcattttacagttccaaagccctgttttttatactcgtccagataatggtctgtcacacttaagataaacagcttgtgggcgctttttaagcagaattccttaaattcatccagtaacttgggaaagtcctcatctttacaaaccgggtcaccgttgactaccacagtatcgcctacgatcccataggggataacgccgtccacctgctttccaaaatagaggatcttatcatcttctaaggtcagataggagcagggattttggctgtaaaggtttaataaggtcctggcatgctgcaggtcagatgctgttttcccgggatattccatccacggacggaatatatggactgccccggccaggatacagccccagctgaacagaaacatcagctgctctaaatgctccgcaaactctcctcctggaaattcaccgcctatgccaaaaagcattcccacaccagctgcaaggctttcaacaaaagagaccgttccttttcccagagccagatttatataatggcgggtgatggctgcgttgacagctactcccaacagggataagaggataaagccaacagcctgttccaccgactttttagaggccggacagcaaaaatcttttctgctccacaaaaggatgaaaaagacagccgcctggaccagcaggaataaacttcgggcctccagtcctgtatgtattatctcttccagtccccgcaggagacttaaagtcagtacagccatggtcatttcccaggccgtcctctttcgcttcatcagctgggtggaaaggaccagcagcatcactgcaaaagctctctccaccatccggttcatttccagataagagcgcaccttttgtgacatggcagaagaaggaaacagactggctgccagtaagataaaggctgctgctcctaaaaataatatggttccattttctagttgtatttttttctgtctgctcatagaagccaccctcaaaatcacctttgcaggtttgccgctttagactccataactctcatgatttcattttccgttaccaggttaaagtctctctggatcatcagttttaatacactggctgaaatagagaaatcaatcagtttctgaggttcaaatcctcttaccagactgtgtaacagcgctcctgcaaaagcatctcctgctcctactgcctcaaagctgtgtactttatgtaccgggctttcatagaacacaccatcttttaaatagatcgccatccagtcaccgtcttctgctgtatacatgttgcgaaggacgctggcaactgccttgcagtttggataacggttctggatctctttcatgcctgccttgtagctttcaatctgatcaattccctttgaaatatccccgtcatatgcgtggatccctaaagatgactcaaaatcctcatcattggcaatgcataatgttacataattcatcagctcgctcataactgactgtgccttttttgtatcccacattttagagcggtaatttaagtcgcagactgtctcgattccgtgggctttgcagtattttaaggcttctaatactgcctttgctatattctcgctgactgccggtgtcacaccggaaaaatagaaaatatctgtatcctttaagatctcatcccagtggaattcttccggctttgccaacgccagagcgcttccttccctgtcatagactacattggtaggccgaatatctgttcctttttcaaagaaataaattcccagtctggaacctccgatgactaccttggaagtgtctgccccgtatcttctcacttcatttaaggctgctgtgccaacaggattttccggcagtttcgtcacaaaggataccggatccttaagcactgccagggaaactgctacattggcttctgcgcctccgtaacttgcctcaaatgcatctgtctgcaaaatcctcatatgctccggagtttttaatcggagcatgatctcaccaaaagttactgttcttttcatggtctgctctcctctatcatctttaaaatatctgcttttgtaagttcgccaaaggaaatgcctcctccggttacgatctggtctgccagatttcgctttgcttcctggagatttaaaatattttcttcaatggtatcactggtgatcagcttatataccataacctgcttttcctgaccgatcctgtgggtacggtctgtcgcctggttctgggctgccacattccaccatggatcatagtggatcacaatatctgccgctgtcaggttcagtcccgttccccccgcctttaaactgatcagaaatacgggaacctcattctggtggaagcgggataccatctggatccgttcttcctttggcgttgcccctgtcagcttataacattcgatcccctcttttttcagttcttcctcgatcagatccaacatagaggtaaactgggagaataataagatcttgtgttctccttctacacctgtacggatcagatccatacaggtcttaagcttggcagagcctgccttgtaatttccatagcagagcctcggatcacagcagatctggcgcagctgcataagatctgataagatctgcagcttttctgctcccttaaagtcatctgcttccagcttttcttttaataaaagggcatttgccgtataaagcttcttctgttcttcctctaaagtagaataaactactttttccagcttatccggaagttcttttaacacatctttctttactcttcgcaggataaacggtccgatcagtccctttaagcgttttaacacctgctcatcccggtctttcgtaataggtacctcatattccttgcggaaatactgatttccaaacaaaaatccgggcataaggaaatcaaaaatactccataactctcccagcctgttttcaataggcgtaccggtcagcgcaaaacgggaacgcacctggacagcctttacagagcgggcactctgggtagtggcattttttatgtactgggcttcatcaatgatctggaatcggaaatcaatcccctcatagtgggcaatatccctctttaacaggtcataggaagtgatcaggatctggcagccggaaggatcttcttttattttttccagcagttccaatctctggggtcctgttcccactacagaccgaaccttcagatccggggcaaatttctggatttcctgctcccagttataaaccagggatgctgggcagactacaaggcttggggccttctccccgctgctgtaggtatcttcaaaaagagcgatcacctgaatggtctttccaagacccatatcatccgctaaaatgccgccgaagccgcatttatccagggttttcatccaccggaagccagttttctggtattcccttaaaatagcttcaaaccgggcaggaaccggctcatcgctgtcctcaaccgtctttacagcacggaccattgacttaaacagctggtccctgtaataggtaatgcccggaccttcttttaaaatatggtccagatacagtgctctataagcaggcaggcggatggtgccgctttgtaagtcctttttgctgattcccagctctcccgccagttttgtaagggtaaacataccgccctggtccagcattaaaaactgtccgctctttaagcggtaatatttctttttctggctgtaggcagtcaggatacgtcccagttcttcttttggaaattctcccatatccacggtcagttccagccagccggaataagcgctgacacctgcagatacagaaggagtttccacaattttccagtttttcatggactcagacaggtatacatctcccagtccccggaattcttccattccctgatctaacaagtggtacaaggctttttcatcctcttttaataccagcctgccgtcttttggatccctgcacttaaaatacttgcggatcacctggctgatcttaaactctcccggcacatcacggcagatcgcagacgggagattttcatcttctatgggatggaaggtatattccccataagataaaagaggttccatatataaagtgcctttttcgtctgcgtcaaaacggaacaccgctttcaaaggctccattttatattcttccagatctacttcttcctggatcatgatgctgtagggctttaatgtcttaagtacacgctcatataaaagaggaatgtcctttgctcctgcctggatccggtattccctctcctttgtgatctgctccaaaaaggtacctgccgcctggctgaagtggtgggaacagcagcagagggtctttcctgtgacaatataaatgcgccgctctcccctgaaaaaagccagtaccggctctgtgtccccttcttcgtctgtccggacaccttctaacacagcttccacgccgtcccttccatatctgcggatgcggatcaccagtttcggatcttttttctgtactttaagctgggaacggatccctcccggaagctgcacctccagttcttcctgctgtaaaacctcaaaaaaacgttcccggttcatacggcttaaggatatatccctctgggatttctgtccctctgtcagtgccatgactaaagacaaaagtcccctgcattccggacagaaggaacttccctggtgatggaaagccaattcttttccgtattccacataggcgcctacagccactgcatcggaaaaagctgccagatcccttactgcatacattttttcacggcctactttaaattccagccggacatcccttccgtttaagatcacagcaggcaccagttttacctggcttccctcttcttcctctaagatgcgggctacctcctggttggtatactcccggatcatcgtgtggacctgggaagaactgtgtactagaggcttggacatttccgcctgatattctttataatatgcaaaaagggcctccccatgggcgcagatgcccctgtaagaattccctttttcacaggtacaggaataatcctttacctgaccatttttcagatataactttgttttaaaggtgtgggcctggtcctccaccagacccactacgccagcttcgcctttccagaaactgtttgtatccattttgacgatcttcattgacgttgatctatcccttctttacatccgctccggagcctcgattcccagaagtccgatgcagatctccagtgttcttctggtcagtgtgatcagaccgatgtagctgtcttttactgcctggtcttcctcagagaggatctttgtatcgtggtaaaagctgttaaatgcatttgccagctcataaatatactgacagatcttatgaggagctgtctctgcaaagccgttttcgatgacttcattgtacttggaaagctgaagcatcagtgccttctcagaagcgccctttgcaggaaggatcttcttttcagagccctcttctgttacctgtccgccattttccttatatttatttaaaatggacttgatgcggacgatggtataaaggatgtatggacctgtatttccctcaaaagaaataaagcggtctgtatcaaagatataatccttggatgcctggttggacagatctccgtattttaaagctgcaagacctacgatctttgctgtctcttttgcttcttcctcagatacagtgcggttctccataattctctggtaaacagcctcatcaatatctgcgatcagcttctccagacgcataacgccgccttctcttgtcttaaatggctttccgtctttgccgttcatagtaccgaaacctaagaataccatcttagtctcaggtttcacgattccggccttctttgcaacacggaacacctgttcaaagtgcatcgcctgacgcttatctactacgtaaatgtagcggtccggcttaaagtcttcctcacgctctacgatggtagcaaggtcagaagttgcatacagggaagcaccgtctgacttacggatcaggcatggcggaatctccttggtatcactttcttctgctacatctacaactaaagcgccctggctttcatgtaccagtccctgtgcttccagagtgtcgatcatcttctggatatatggctctgcatcgctttcgcccttccacaggtcgaaatctacgttcaggttggagtagttcttcttaaggtccgctacagaaacattcataatatgcttccagatggctctgaatggcggatatcccttttgaagctttaaggttgcctgatgggcgcgctccttaaatgcctcatctaccttggacttgccgctggcagccgggtagatctcctctaactcgctgatggtaaaaggagcttctgctggatattctcctgtataattttcatcaaagtatggcagttccggcttgcggtcacgcagttcctcgataataaggcccatctgcagtccccagtcgcctaaatgtacatcgccgatcacattgtggccaaggaaacgtcccatgcgctttacgctctcaccgataactgcagaacgcaaatgtcctacatgaagaggttttgccacattggcaccgccaaagtctacgataatggtctctttcttttccggttctcccagacccagcttctcatctgctgccataccgttcatatagtcagctaaaaagccttcagaaagttttaagttgataaaaccaggcattactgccacaacctcagaaaatacagaacttgcatgttctcctgtaagctgttctaccactgcatttgcaatgtcgataggtttctttttatatgccttggcagctgccatagcgccgttgcactgatattcgcacaggtccgggcggttggataaaaccacttttgcgaatttttcttcatagccgcaggctgtaaatgctgctttcagctcctgctccagagcttccagaatctttttcacaatatcattctccttgtattcttttcttgatgtactccccgggagtatatctcatatacgaaaatcgctccggcggtctgccggagcaatcttttactttttatctaagcaataatctgcttatacacgggacagatattcgccggttctggtatcgatcttgatcttatcacctgtgtttacgaataacggaacacttacagtagctccggtctctacagttgcaggcttgcttgcgccagttgctgtatcacccttgaagcctggttctgtatcagtgatctccagctctacaaacagaggtggctctacagagaatacgttgccgttgtaagaacaaaccttgcagatctcgttctctttaacgaactttaatgcatcgccaatgatgtccttgtttaatgctaactgctcgtagttctctacgttcatgaagttatacagatctccatcctcatacagatactgcatatctacacggtcgattcttgctgccgggaacttctcggttggacggaaagtacgctcaacaacaccgccgttgataacattttttaatttggtacgcacgaaagcagcgcccttgcctggcttaacgtgctggaattcaaggatctgaacaacctgtccatcaatttccagtgtaattccgtttctaaaatcgcctgctgatatcataaagatattcctccttaagttcgttcaggatgctgcctgcatcctctaatttctctctaatcttttttattttatactatgtatgtacgtttttcaagttcttttttctgttttacagcttattctggatgattttacagccaccagccacttatttatgggcttccctgtagatttcctctgtgatggcatctaaagaccggtcatttacatccactgccacatgggctgcttttaagtataatggcctgcgttcattaagtaaacttctgatccgtccgggcacatcatcactgtgcagcataggacggctggacacatctgcaccgatccgcttataaacagtctccggtgaaacatccagatatactaccagtcccagcttctttaaaagttcccggttttcctctcttaaaggaagtccgccgcccacagagatcactgccccgtctgtggtccttaacagcttttccaggcactgtgtttctaactttctgaaggcttcctctccctgttccttaaagatctgggaaatagccatacctgcttctttttcgatctcctgatctgtatcaatgaacggcatgtgataatgatctgcataaaaatggcctgcgctggtctttcctgctcccataaagccagtaaagatcacattgtgctttctggtatttccatgtaaatgatccaggatcatttcacggatcctgtcaatggtatctttatctacctttacctccggattccacagttcaaacgcgatcagcccctgatacaaaagcatatccagaccgttaattgcttttccccctgcagcctgtaccattttcataaacttcgtacaggaaggtgtgtatacaatgtccactgctgtgtggatcagcttataaaaagcttcatcttctataataacgtcctctgtatgagggtgcatgcctacgctggttgactggatcgccagatagcccttttcttcctgagggatctggtcatactcttccagttttaacgggataagcactgcacggcccatcagtccgttaatataatcagctaaagccgctgctttctccacgcttcggtttaagatatatacaacggacgcgccggactttgcaaggatgtaggctgctgccttggctgcgcctccggctcctatgaggatacatttttctcctgcaatagaaatacctgcttcatccatagcacgttttaagcctgcaccgtctgtattataacctttgtatccatgctctgtacgcaccagggtatttacagcaccgatggcttttgcgtcttcatcaatggcttccaagcacttcattacatcctgtttatgtggaacggttacattcattccctggatatttaaagcaaaggcaccttttacagccatttccacagttcccctgtttacgtgaaagggaacgtagactaagtctgttcctgtacgctctgcgtaaaaattatgcataagcggtgacatggaatgttcgatgggatctcccattacaccgtatacttttgtttttccatccattgcgttatctcctgctgtctctttttactttttcacacgattttcttttgtctggatcttacttttcaaggcttttcctgtaacagtataaaaccggtttttccagataacgttttaatacgatctggatctcttcttttgggttgatgggccgtaccaggacagtctggatccccagacggttggcgccccagatatctgtaaaaagctgatctcctacaaacagcgtatttttcacatcggtccccatggtctccatggcctttttatagccttttgcccctggttttccccctttataaatataagggcattttacctgttctgcaaaagatttcactctcggttctttattattagaaagaagacaggttttcaatcccaagcctctcagatgctcaaaaagccggatggctctctcatccgccggtgccccatgcgggactaaagtattatcaatatcgtaaacgatcccctggatccccatttttttccagttttcataaggaataacataagaggactcttccattttacttgggtaaaaacattgaaacatattaaattctactttcttttagacttatttctttaaaagttttcccaattcttccataaaggtacttacatccttaaactccctgtaaacagaggcaaagcgcacataagctacttcgtctacacttttcagtttgtccatgaccagttcaccgatcacagaagttgggatctccttttcctccctgttaaagatctggttttcgatctcatcgatcatggtactgatctgacggggagataccggacgtttatgacaggaatgcagaatgcctgcttctattttggagcggtcatatgcctctctggaatcatcttttttaatgaccataaggggcatggtctctaatttttcatacgtagtaaaacgcttgccacagcgttcacactgacggcgcctgcgaatggaactgttatcatctgccggacgggaatcgatcactttggtatctgcttcattacagtacgggcacttcataaactctgcacatcctttctctcatgtattttttacaaaatgatgattttattttaaccgaaagccccctcaagcgcaagatttttgttacaattccccagtttttcccatatttgttcctatatctatagacgaagaccatttttatgtcttataatagcggataataatacagtctatgctgtttaaaaggagaacaaaacatgaaccatacaccctctgtttctgtgagaaatatagttttaggagaagggatcccaaagatctgtatccctcttgtaagcacctgcctggatgcacttttaaatgatataaaaaaagcgctggatcacagcgctgatcttattgaatggcgggttgactggatggatgacatttttaaagaaggctatctggaagagatccttcctgctgtacgaaaaacagctggggatactcctcttctttttaccttccgcaccaaaaaggaaggcggaaatatggctgccagccttttacagtataaagaactggtaaaaagagccatctgctccggcctggtagacctggtagatattgaactgttttctgataaagatactgtaaatgagctgatcgccctggcaaaagaaaaaaatgtaaaaaccattctttccaaccacgatttcgttaaaaccccttcaggaaacgagatcttttcaaggttgaagcagatggaggaagcaggggctgatattgcaaagatcgctgttatgcctgaaagcacagaagatgtactgactcttctttctgccacctgcaaagcaaagaaagaactcacctgtcctgttatcaccatgtctatggcaggcacaggcctgatcagccgcttaagcggggaagtattcggctcctgccttacctttggcactgcaggaaatatttccgcaccaggtcagatcgatgcattaaaacttcgttctgtccttcatatccttcacgaaaacagctgattctttccattattccattaactgttattacagccctgtgcaatgacagaaatgactttctggacctccaacggtttggcaaaataggcattcatacctgcatccaggcatttttgcatatcttccgcaaaggcattggctgtcattgcaataatagggatcgtttttccatccggccgttctaaggcgcagatcttaaatgtacgcttttaacgcaaaattatctttcgtaaccgcaactgtattttctgcattttcattaaaagagtcctttgccgtagtagcagccatattaaaggtccatatggtatcagacaggacaaaaccgtttgtttctgctgaataaggattttggctgacatgaaagatcaggccgatctccccggtatgtaaagcctgaagctgctcatttcttgtatcataacctttcaggtcaaattccagagtctgcccctgaagacaatcttttgcaagctccacataatccttgataactcctgtcagttcaccggttgcaggatccatgacaccgacacctgcatcatcatttaaatagccgatccgaatgggaccatggtccgcgatccattttttctcttcccttgaaagaaatccactgcgctgtccagtgctttttttatgtcaggacggtctttgttgacaacaaaataaatgtccatatgataatgcgttaatctttaacagccgcaaatgatttttgttcacacattcttcacattttacacaactttttctcacattttttcagtatatttatttacgttaaaagcgaatgcttttcatacaactttttctcacaaatcggccgacaggtgaaaacctgtcggccactcctcgtttatgggactttttacatcttagcacttcttatccggcttttccttttctttctctttaaagcttaccaggataatgtcacttccgatctggcatacatcacaaaacgggatcacatattccttttcccttcctaaaaatccgcagatacacccgggacccggcactaccagtgctgtaatacagcctgttttttcatcaaattccagatctcctacataccccaggcgggcgcagtcctttatattgatgacttccttttgtttcagatcataaagacggatctctatctgccccttttccttctcttatttataaatatattttggaaaaagaaaaaaagaaccctatccccacgatataggagatagagttcttatgcatgtaaccaggcttttatcagcagcaaagatccacgattacctgtgcaaagatcttcgcactgtcaaccagttcctttacaactgcaaactcgtctgcaccatgcatacggttatctgttccaggcatggagcagccaaaagcaacaccatttttcaggctgtgtacataagtaccgccacctgtatactggcagctgccctttaaaccagtgtattcttcatacgcctttaagagagtgcgtacaaaatgggagtcgccatctacataatgaggtgctctcatatgttctgccagcagctcaatgccttcctctgccatatgtgcctttgctacctttaatgcattttcatcatttgcgcagatcggagcacggcagtcaaaggtgccatccaggctttctgcgtctacatgaagcaggtcaaatgcaatagtcagttctccggaaacttcatcactcatagcaacgcctaaagcttttcctctggtatctccatgagggaacagctttacaaggctctttactgcatccatctgcgggcaggaagctagcggcagttttgtgatcagcattaacagtgcagttaatgcattctttccttcttccggagtagatgcgtgagcgccttctccttctgctgtgatcaggactccttcttcacagcctgtaaaggtaaatgtaacctctgtttcttttgtaacagcagctgctgtttcatttaatacagcatcctctacaccagctacaactgcttttgcctttccaggaactacattgctcttaaggcctgcatcgatcttaaccagctttggcatagcatcggatttttcaaaagaagctacaaaatgacctggaagccgtcccttttccacgttgatcacagggaattctgcatctggtgaaaaggtcattggagcctctttttcctgcttatagtaaacagcaatgtcagagcttccacattcttcatctgtacctaagatcagacggacattcttctttacaggaattcccagttcctttactgcacgcattgcataaagagctgcaacagccggtcctttgtcatctgcagtaccgcggccataaagctttccgtctttaataactggctcaaagggctcagtcacagtccagccttcccctgcaggcactatatccagatgggccaggatgtcaagctgtgcttccttatcatttaagtctgctgttcctacataattgtcataattgcggacagaaaaaccataattttccatcatggtaagagctgtctgtaatacctcaaatgggccctcgccaaatggtttcccctctgtgtaaggcattttttcactattgatccggcagagagtgcaaatatcttcgatcatctggttcttgtgggaatcaatatattcttcgatttcttttctgtacatgaccttctcctgttctttttttacaatccagccatgacatctgcatggccagactattttttatttattctgctattacttcagcatagcacccagagtttcgttgacaaccttgccatctgcttttccctttacctttggcatcagtaccttcataatagcgcctttgtcctttggtgtaggattttcgatccccagttcttttaatacaccgtcgatcacttctttgatctggtctacagacatgtcttccggtgcaaattccttgtaaacagccagacgtgcgcctgcctcttcgcggatatcatctctgtcagctggagctaaatcataagtctcctgtgtctgacggatctcttttttaacgattgcgtcttcttctgcctctgtaaggggctctctcttgtcgatctctgcgttctttaaagcggataataacatggaaagagagtcttttcttgccttatcctttgccttcattgcctgtaccatagctgctcttactacatcgatcttgctcattttgtaaaacctccttaaatatgccttcagatttatgtttagttattaccaaactcgcttaatttaagacccggatttctttcaaggaccatgccaacgctccagctgttaataaacagaagcagtgggttgtcctttaagtctttaatacgcttcatatcagatgttccctggatacgcgccacatctacttcctgtggattttctacccagcggatatattcatatggaagcttctctaagataacttctacattgtattcattctgtaaacgataagtaaggacttcaaactgaagtacacctacaacgcctacgatgatctcttccatacccgtattaaactcctggaagatctggatggcaccttcctgggcgatctggtttacgcccttgatgaactgcttacgcttcatggtatctacctggcgcactcttgcaaaatgctccggtgcgaaagtagggatgccctcaaattcaaatttttcattggatgcgcaaagagtatcaccaatagagaagatacctggatcaaatacaccgatgatatcccctgcatatgcctcttctacgatcttacgatcctgggccatcagctgctgcggctgagtcagacggatctttttaccgccctgaacatggtttacttccataccagcctcaaacttgccggaaacaatacgcataaatgcaattctgtctctgtgggccttgttcatgtttgcctggatcttaaatacaaatgcggagaaatccttgttaaatggatctactacgccggtcagtgtttttcttggaagaggcggtgtggtcattttcaaaaaatgctccaggaatgtttcaacaccgaagttggtcagcgcagaaccaaagaatacaggggaaagatcacccttctgtacacggtccatatccagttcatcgctggcaccgtctagtaattcaatatcatctaataactgctgatggtactggaagccgataatgctttccacatcatttgtctctgcgtcaaattcctgggtagcaacctcttttgcaccgccctgtgcagcggtaaaggtagttaccttctttgtaaagcggtcatatacgcccttaaagttctttccgcagccgatgggccagtttaccggacaggtacggattcctaatacttcttcgatctcgtctaacagttcatatggatctcttgcttcacggtcaaatttgttgataaatgtaaagattgggatatggcgcataacacaaaccttaaacagcttgatggtctgcgcctcaacacccttggatccgtcaatgaccatgacagcggagtcagccgccatcagggtacggtaagtatcctctgagaagtcctggtgtccaggtgtgtccaggatgttaatacaaaagccttcgtaattaaactgcatggcggaagaagtaacggaaatacctctctccttctcgatctccatccagtcggaaaccgcatgctttgcagcctttcttccctttacagtacctgccaggttgatagcgcctccgtagagaagaaacttctctgttaaagttgtcttacctgcatcagggtgggaaatgatcgcaaatgttctgcggttctttatctgttctgttatctgatcatttgtctgtgacaatggtctttcctccgttcttactaactcactgattaattttcaaaaatcctcctgcaagcaagcttgcgtcggatttccgggtttttgaccctggtatcgacatattattgtattatgattatgaagtaaagtcaagaatctgtgtcagcaattcgtcagctacctgctctttactcatcttcggcagttccttttcgggagtttgacacctttccgaatgaaaaa

SEQ ID NO: 3698 - DNA, 1083 bp, Unknown
  gut microbiota DNA sequence
caacattctctggatctgttccatattggcactttgagataaatcataagaaatgatttcgtttgtgttcatgtcgagtataggagagagataacacttcccccacgaaaaaccgaactgagatacatcggtagtccatttttgcataggagctgtcgtgctgaaatcccggtcaaggatattctcagcaaccttgccgacctcgcccttgtaggaatgatacttttcctttgggcgctttcctgccaaccccatagtgtgcataagccgttgtacccgcttatgattgaccttgtggccgcgctttatcagttcctgatatactcttcgcacaccgtagcggcctttatgctgtgagaaaatgtctttgatttcatctgccaagcaatggtttcgaacagcaacttgatcggccttgctcaactcaaaataataggtagaccgtgccatctgcatagatttcaacagatatttcaattggtatcctttttcacgcagctctttgatgatcgctgctttctcgccttgagttgcgctgcgtgcctctcttctctcaaggcgatctctttttttataacttcattctccgcctttatatactcgttttctgcccgaagccggatcaattcttctcgttcggattcattcagtggccttgcttcttcctttttcatttggggtacccctttacttggacgaccttttttcatttctaccaggccattatacccctttgttttatagttttgaacccattgatacaatagtctatcttgaataccggcctcgattgccactgacacacaggattttccggacattacttgggatactagttccagccgttcttctggtgtccagttcctgttgaaatttttgtgtttcagtgcttctggaccgcggctatcctctgctcttacccatagtctcactttatcccgaaaggatttatcgctaacaccttccggcgtttctggccattttccttctcgatacagttctacacatttccttttgtactcatatgtgtaccgcataataataccccctctactgggtgtccagtaaagggggtacatatca

SEQ ID NO: 3699 - DNA, 752 bp, Unknown
  gut microbiota DNA sequence
ccgcttgttatatccagaacagagcttttaccaaatacattctttccatctccgaatgtattgacataactttcaaccgggttgctttcttttcctcctaatgtcagttttttgccaccaatcgttagacccttatccccgaatggcagctttttgttattgtacataaaagcatactgatcattcgcttttgcggcattctcttttgcctttttaacagtatccgcaaaatctttctgttgaggaatgtcagtatactgaatgaatgtatctccgtcttgaaatccgaccttatccttagcttcctgctgctctttttctatcctttttcttttgcggtattcctgtaaaaggtcgttttcgtactgtgcttcatttaacatccacttttgctgctttatttggttgtactgttttaccgcatcagccatggggatagaactctcagcgactttttccctgtcgctccggataaaatctgtcatggctgttgtatgctgactggttgaactcttgcgcaaccagtcctgtctttcttgtcttttctgctcgttttgtaattcaacaagtttctctttatcttttttagcctgcagcaagcttctcaaatcgctttttcttgttttttgagattcttcaaatgatggtatgccgcttaccgtgctattcgattcactttcataagtatcatcgttgttctctaaaacttttttcttttttaatatgctagataatgaagtccccaaagttgc

SEQ ID NO: 3700 - DNA, 319 bp, Unknown
  gut microbiota DNA sequence
gttacgctgccctgggtgttatccatgagctgtacaagccgatcccgggccggttcaaggactatattgccatgccgaagccgaatatgtaccagtctttgcacaccacactgatcggcagcaacggccagccgtttgagatccagatccggacctttgagatgcaccgtaccgcagaatacggtattgcggcgcactggaagtataaggagagcggaagcggcaaggttgctgcaggcgatgaagcggcaaagctgtcctggctgcgccagatcctggagtggcagaaggacaccagtgactccaaagagttcctgag

SEQ ID NO: 3701 - DNA, 4975 bp, Unknown
  gut microbiota DNA sequence
gggcaacaagatggtcggagcaagggtgaacggcaaactggtgccgatcgagtatgtgatccagaatggcgaccgcattgaggtcatcacatcccagaactccaaaggcccgagccgtgactggctggctctggtgaagagtacccaggccaagaacaagatcaaccagtggtttaagagtgaattaaaagaagataacatcgtccgcggcaaggatctcatcgatcgttactgtaagaccaagggcatcaattttggcgatttaaataagccggagtttcaggagaaggtcatgcagcgttatgccttccgtgactgggattctgttctggcttccattggccatggtggcttaaaagaaggccaggtcatcaataagatgatcgaggaacgggagaagaagacccgcaaggaggttaccgataccaacattctggatggtctcagcgagatgtccggaaacaaagccgaggtcagcaagaagaccaagggcggaattatggtaaagggcatccatgatgtggcagtccgtttctcacgctgctgcagtccggtgccgggcgacgagatcgtgggctatgtgacccgcggccgcggcgtatccattcaccggacagactgtgtgaatattatcaaccttccgtcggaggagcgcacccgtctcattgaggccgagtggcagcagccggaggatgacagcagcaccaaggagcgctacactacggagatccagatttacgccaataaccgcatcggcatgtttgtcgatatttccaaggtgtttacggagcgccagatcgatatcacctcgatgaatgtgcgcaccagcaagcagggcaaggccacgatcattatgacgtttgacattcacggaatcgaagaactgaaccggctgacggacaagttaagacagatcgatggcgtgatcgatatagaaaggactgcgggatagttgttccgcagtttttctgtgtttcggatatagaaaaggagcagattatgagtgattttcgaattaaaacctatgtgctgggcggtgtcagcacaaactgttacctcgtgttccgtgagggcgaaaaaacagccgtgatcatcgatccggcagacaatgcggattacttaaagaacaaatgccgggaatttggcgtgaaacctgaggcagtccttcttactcatgcgcattttgatcatatgctggctgcggatgatattcgcaaagcttacggatgcaaggtttatgtccatatggacgatgagcggatgctgaatgacccgtttctgaatctttccggaaccatgggaacagagcagaccggtatcagcgcagaccatctgctgcgggatggagatgtactccatttcttaaacagggagtggaaggttatggccacaccgggccatacagcaggttctgtctgttattacctgccggaggagaaggtgctgttcagcggagataccctgtttgcggagtctctgggacggacggatcttccgaccggaagcatgtctgccattgttcattccatcgcagagaagcttctggtgctgccggatgatatcatggtctatccgggacatggtgatgctactaccattggttatgagaagcagtataatccggtggcagcttatgtgagaaagcgaggcatgcaggcatgatcggaattttgttaaatgacagcgcttacgagcaggatatccgggagcttctgatggcattttacccgggacagacctttgcgcatgaaatgcaggaggagctggacttttttgtggaaggaacggtaaatgaagatcgtacggagtttacgttatgtctgggatatttcggaagctcctgcttccatctgctgtccatggagaaactggagccggagatccgggccgaatttcaggcggcggcggagaacagtgttctgaaagtaaattacgaaaatcgctttgagacaaagaataagattaaacgcagactctatgtgcttctcatgcagcagacgggaaagcagctcccgtggggaaccttaacaggcattcgtccgaccaagattgccatgacaaagcttgcggaaggcgaaacggaagagcagattttccgccacatgaaggatacctatttcaccagcgatgagaagattcacttaagcatcgaaattgcccagagagaacgcaagctgctttcgaccattgattataaggaaggctacagcttgtatgtgggcattccgttctgcccgaccacctgcctgtattgttcctttacctcttatccgatcggaaagtggaaggaccgcactcacgagtatctggatgcgctgttcaaagaactggattatgtggcagaaaagaagaagggctgcacgctggacaccgtttattttggcggaggaaccccgacttctctttctccggaagatctggacaggctgatcacaaaactaaaggggacctttgatttctctgccgttcaggagtttaccgtggaagcaggacgtccggacagcatcacccgggagaagctggaggtgcttaagaaacatggcgtgggccgtatttccatcaacccacagactatgaagcaggatactctgcgtctcatcggacgccgccacacagtggaggatgtggtggaccgtttcaagcttgcccgtgaggttggctttgacaacatcaatatggatctcatcatcggactgccggaggaaactctggaggatgtacaggccaccatggaggcagtgaaggccctggcaccggacagcgtcactgtgcattccctggccattaagcgcgcagcacgcttaaacaccatgaaggaagtttataaggatttaaagatcgagaatacgcaggagatgatcgatctgactgcccgctacgcccgtgagatgggcctggagccgtactatctgtaccgccagaaaaatatggcaggcaattttgagaacgtgggctatgcggcacctggaaaggcctgcatctataacgtgctcatcatggaggaacagcagaccattatcggctgcggagcaggaaccaccaccaagcgtctgttcgccgaggagaaccgtatcgagcgctgtgaaaatgtgaaggatgtggagcagtacatcagccgcgtggaggaaatgattgagcgaaaagaaaaattgctgtcagatgcgcagtaactgtaacaagttgaacgcttacgattgcaatttgttccttagaatagtataatttgtaaacgagtatgtgattttcaggaagacttagaaacatagaaaacggagaataaatatggcattaaaaaagaagccggttaccggcatgcgtgatatcctgccggcagagatgcaggtgcgggaatatgtgatgaaccagatccgtgaaacctaccgcagtttcggatttacccaggtggagactccgtgtgtggagcacatcgaaaacctgaccagcaaacagggcggagacaacgagaagctgatcttcaagatcttaaagcgcggagaaaaattaaacctcgagaccgctgaaaccgagaacgatttaaccgacagcggacttcgatatgacctgaccctgccgctgtcccgttattattccaataacggagcacagctcccgagtccgttcaaggctctgcagatgggcagcgtgtggcgtgcggaccgtccgcagcgcggccgtttccgtcagttcacccagtgtgacatcgacatcctgggtgacgcaaccaacatggcagagattgagctgatcctggctaccaccactgcccttggcagaatctgcccgaagaacgcgtttaccgtccgcatcaatgaccgcggcattttaaagggcatggctctttactgcggcttccccgaggatggcctggaccaggtattcattaccctggataagatggacaagatcggtctggatggcgtaaaggcagagcttctggagcttggttacgcagcggaaagcgtagaaaagtatgcagaactgttatccggccttggcgaggacgccgcagcagtccgtggtcttggcgagaccttagccggtgtgctggatacaaagaccgcagagaatctggccaatatcatggataccgtaaccgaggtagccgagaccgactttaagctggcctttgacccgactctggtgcgcggcatgtcctactacaccggaaccatcttcgaggtttccatggaaggctttggcggttccgttgcaggcggcggaagatacgacaagatgatcggcaagtttaccggtcaggatactccggcctgcggcttctctatcggctttgagcgtatcgttaccatccttatggagcagggcggcgaaatcgaaaatgcggctccgaagaaggcttatcttatcgagaagggcatggatccggcacgctacggacagatcatgaagcaggctatgggcgagcgcaaagccggtgtccaggtgcttgtttccatgatgaacaagaataagaagttccagaaggagcagttaaacaaagagggctataacgaatttgtagagttttataaagaagccctgaaataagagctttgaaataagatcattgaatcaaaggagataaatcatggcagaatcaatgctgggactgaagcggtcccatcggtgtacagaagtcaccacagcaaacatcggtcaggaagtgaccgttatgggctgggtgcagaagagcagaaacaagggcggaatcatttttgtggatttacgtgaccgttccggtatcctgcagatcatctttgaggagagcgactgtggtgcagagagcttcgcaaaggcagagaagttaagaagtgagtatgtcattgctgtaaccggccgcgtggaggcacgttccggcgcagtcaacgagaacctggcaaccggtgccattgaggtgcgcgccaacagcctgcgcatcttatctgagtccgagactccgccattcccgatcgaggagaactccaagaccaaagaggag

SEQ ID NO: 3702 - DNA, 236 bp, Unknown
  gut microbiota DNA sequence
ccggagaaggttcagtttggagacagagttgtaggtatcatcgaagcccgcgatggcacgatcatggacgttgtacgccagatcaagccatatgagtttgctgactaagcaaaccaaaaacaagcggctgcgcagcagacatttgtttttggtgcgtgtcagcaacgaacaaaccgcctgcgtaagcaggcagtggagcgcgtaagcgcgggtttgtgagtctgcaaaatttataa

SEQ ID NO: 3703 - DNA, 307 bp, Unknown
  gut microbiota DNA sequence
tgtacaggtatttctcaaactcccatgcggcttccttctgctcatcggtctgtgcggtgatagctaagaagcatccgcctgccggaactttacgcgggctgctgccccatgtcggggattttacggtagcgacatcgaactgcgcgctcttctgaatggatgcgcgacgggcaatggtggtgtagagcattgcgcagttgccatcaatgaagctctggcagccttcatcccaggaaacatggagagcggctccgtccttgatgaggtcagcaaccatctgcatagcctgaatgccttccgggcttgc

SEQ ID NO: 3704 - DNA, 425 bp, Unknown
  gut microbiota DNA sequence
attttttaccaggttctgaccgtataagtcagacatcagagagtgggacagaagcaggatcggataaaaatacagcacaaaatgaggaatctcaaaaggtttcaatggcatttatgatagatgaaggcgcgctgattgtggaagacggggatgtgatagacatacacagcgaggactttttgccgttttgcgccgtagtatctttggaagaatggctgactatagattatgcgaaacgctggaagcaggaagggctattcataacggttgcgtcacgaagatgtgcctattttctgaacaaaaagatgatcaaaccacttgtgttcgagtatctatttcatgtgatccggcggccaatttatacatattcagtgtatcttgtgtggcgtatcctttctatgaatgatcttggaaatattcgtcca

SEQ ID NO: 3705 - DNA, 2049 bp, Unknown
  gut microbiota DNA sequence
gacaagcaaagaacctttgctgttatcggaagatataagaaagctgtaccgacattatgtgaatgtagaatatgcttttggcacatcacgcgaatgtcacaatggagattttttgtgccggaagacattcctgtcatgcgagttttcgccatttgatttgaatgaaaagaagaaggatcagatctttatgtgttacgaaatttctccggatttgattccagaaaatgcaccgtcagatctacttctggcaacgagatataccattgtgcaggccttaacagaaccgatttttatacgttctaatgcaatgttggtggcgctggacgcaagcagtttttcgttgatagtagataccagaaaccgtcatatcattgatgaaatggatcagatattaatgagccggtatgcgcatttgctgtctgaaagtgggtgcaggatgccagtgataaaacgatactggatttgaaagatatggggcggattttgtgccatgtgcgtggcataacccaggtgagaaacgcagcggcctgtgcatggcataactatgttgtgccatgtacaacagaagaaactgtgccatgcacatggagcttatacagtaagaaaaacctatagaatgcctgaaataatgtttttgaacccataaaaaggcatacataaaaaggatatttttagagctgaaaaacccagaagccaggcaccatgaaatatgtatgagaaaaaattagaaataaatgagagtagatgaggtggtacatgttacatcttagaatgatttacgatgagattttaaaaaatagtgtatttgcaagttccaggcccggccgaacagatgcaagggtgattttaattctggccctgctcttaaaatataagcgcctcaggcgggagatgatcctattcctgattcagcatattgatccgtgtatccaggaagctggaagcatggggcagcggacggtcaaaacatgtattgaacggggctggataaaaatgcaggaacaaggaggagcgcgggagaaaggactgtattccattacccaggctgggaagaagcacctttacgaattgataaacgaatatttccatggagatcaaaatatggtttcggtcctggatgcatatgctacaggcaggacaaatatggaattatcccagcataaggaagcagaaatcgcagcggcgctgaaaatggtactctctgattatagagagaaatggatgcagctggagtttgaagttccgtattcagttgaaacgatgcgggagtatggcggccaggcgaagaagcgtggagatgtctttgcagatctaaaattgtcataccgatgcacggatcacttagaagaacgtccactttgtatagagattgatatgggaacagagcgggtaggtacgcatgggggattactttttaaatgcaatgcgtatgcgcaagtaaaccgccggatgcggcaaatctccctgcatcaggcaattaatgtgatgtttgttttcagcaatgatcctgcggatgatcttcagcagacagatcttttaaaatttgaatccataaaacgttatcaacagccgctactgccatttctgtcctttatctgcaggcaacaggatccggatgcttctgtaactttggaaaaaatggaacaggccctggtaaaggtaaaagaatgtgatgcgtttggctatgaaaagaaacagttttatcgggatgcaggattctttttgcatgttttaaaggagcagtgcagtaatcaggaacaggccggagagaaagaaatcctagcttgtatgacagaaatatcggatttttgcagaaatgatttggaaacatccagaacagagtacagcaggcagtatgctctgaaaaagagaatggatctgtttgaacagatcagaaagaataattcttatgcattggcggggctgaggaatggaatgagcctttgttgtaattcccatcaggattttgaaaaggaaattccgtacttattcccggagctatacttccgcgatcagtttggcgttcttctctttcatttagggattatc

SEQ ID NO: 3706 - DNA, 553 bp, Unknown
  gut microbiota DNA sequence
ggtgagcttacggtcctgattgaaaatttgagttccgatatgggcggccttatccgggcaagggattatgtacggctccctctggccgtcagagagaataccattatgattatgctgatgaatgacagggaggaactggctgacgggagctatctgaaagaaggaactttatataaccagtgggggagtgaggagcatatcacggatcaggcagccataggtatggccttacttgcaaaaaaggtggcaccggcaatgacagcattcggcactgggtatgcttttgagtcggttccctttctgatgaattctacacaggattatatcatgcttcattattcagaatttcttcaggcacttcagagaccggtgcgaccctggatacgaatggacctgtatgtgaaggaacagaacaaggtgccatatattccattccttatataccgtacaggagaacatcaggaagaggaaacatacaaagttccatttcataaagaaaagcagtatacgccggttgactggaggaggttatgcaatgattagaaagactgtt

SEQ ID NO: 3707 - DNA, 1797 bp, Unknown
  gut microbiota DNA sequence
gtctccttatatagaggcgcgcatggaacaggagtatttgaaacaggcagcatttcccggaaatgaaggaaaactatcagaagaggatgagcgtaaggggaatgacccaaccagggaagaaacggtgccttatacttcaccgattgattttgaagccttaaagagtattaacccggatattgttggctggatacagatccctggaacagtgatcgattatcccatctgctggcgggacggtgataacgaatactatatgacacattcagcagagggagagaagcgggcatttggtgccattatgctggatggcgccaattcctctgcggcagaggcgcatctggttgttctatatgggcaccatatgcgcaatggaacgatgtttaaagatatcgtcaggtatacggatgccgattttttgaatgaccataaatcaatctctttatttttcccagacagggaagagcgatacagcgtgatcggaaccatcgtttgttcaacaaaaaattttgaaccctcgcaaatggtggaagaggaactgctttttaaagaatggtgccgtaattcatggagaggattgccggaagagataattcaaaagaaaatgcttgcactggtgacctgcagttacggaagcagggatgaaaggacaatctgcttcgcggtggccgaaaattaaaggacaggaggtggtattcctgcgcattagaggtaggagacggttatgaaaaaacggatattcggacgaatgataaaaaaattaaagtggcttgtgataatcggtgtgatgcttgttgcattaggaacggttggaataggtattgcctcggtgtaccacatgaaatatgcacttaaaagtctgtttaatatggagttcaacacgggaaatgattcctgggcttatggagacatctcttcctataataagatcggggaacgggcagttgcgatagcgaggtcacgtttgaactggtcttacagccaggcgaagagaactctggagggatcctgggactgttcttccatggttgcacgctgttaccaggaggccggctttgacttaaaggctatcatgggagcacagtggtgcatgacaacggttgggtggaaggattttgcaacgaaaaacaaacagtttatagaagaagcagatctccagcccggagatgtgatctggtatgggcggccatctggtaatcacatgatgatgtatgcgggaaatgggcaggtgatccatgcaaagggggaaaaatacggcacggtgtatgaaccattggcaaataccggctaccggtcggcaaaacaggtttattttttccggccgtatctaaatttgcttgatgaaagtaccgatgattcctcagatgatgctttttttgcggattcctccgggtatgggcctgataatgggattgtcatgcaagtgccgggaggaacggtttggaccggctggacggtatttgagtccggaagggaacggtttaacctggccggaagcgatggtggatatgcgtatggctgctaccagttcgatatcgggtattccctggtggattttttgaaattttgcgtttcctataatcaggcgcattatggagcgttccagcagtttattgatatgtcttccattgaaagcggataccgcaaggaaacagacacaaagccgagtatgataaaccagcctttatattccaaccgcgcatccctgatcaatgcatggcatgccgcttacatgaattacccagatgaatttgccggactgcagagccggaccgcctacgaagcttactacctgcc

SEQ ID NO: 3708 - DNA, 428 bp, Unknown
  gut microbiota DNA sequence
gatataaaaaaccagaaccagaagatccagggactttccgcagccggtattatcttaagccacggctatgcaacagcttccagtattgcagatgccgctaaccagatcatcgggcgaaaggtattcgatgccattgatatgcctcttgacatgcagatgagtgacatcaccgggctgctagaaaaacacattgaacgatttatcacctgtcaggacgtagtacttctggtggatatggggtctttagagcagatccacagccagatgggcggcctgcgaaatttaaacatcggcatcatcaacaatatttccactgccttagctgttgacatcggccttggcatctgtgggaaccagaagctggaagacatcctgaaacgggccagcgaaagcaatgtctgcacctaccgtatcatccacaatgtaca

SEQ ID NO: 3709 - DNA, 5565 bp, Unknown
  gut microbiota DNA sequence
caggatctggaaccctatcttacgcctgtccccggtcggaatatccatcttttatccgccaaacaggtgaaaggagcataccatctgcctctcaatcggatcatacagctcatttcttctttgaagacttattttgacctgattcttatcgataccgatatggcatccacggatgcttccgcaaaacttatggaaatgtcggacctggccctgctgatcacagatgatacggaatgctcaattaaaaacaatcagcgctttcgccgactgctgacccaaaagcaggtcagttacgatcacatgcatgtgatcgtaactcaaattaggaaagaacaacgaatgtactcggatcaggaaatagaggagctttttcacattccgattcttataacgctgccgtactatgaccaggtctggaaatataataattcttacctgtcactatatgaagatccggaaagtccgctccacccctccctgtcatcattggttgaccggctttccaaacttctggagaaataaatgatgcttttaaataatgatcacggtcatcccctgccggatgccccagtgttttacagtgttctttcgaaaaacaaacaggagctacgggcagcagccagggcgaaccgtatgatgaaacgcttccacctgacaatcccctatatcatcgcctgcctcatggcttactatggtttttttcgctactatccgcagttaaaaaccagttttttaggtatatgtatcctgtattatgccgcggcgtattttatccgctggtatttggaaccacaatatgccctgttccttttgcggcatcggccctactacctcgcagaatcggatacgtttctcttttttaccttatatgggttagaagatgaagacggaaaattgactcaggccagagatttggctgttctttcctggatccagcgatgtaaaaagcagatcccggataacagcccggtccttcgtattatccaaaacagaacttttaaagatctggaggaagaaaaatatattccgatcagtttatatgaactcattctccggcaacttgcctttcaaaatccagacatcttagatgggctgaaccattacagtaggcaatgtgataaatagaaagaggatatccagcaccctcaaagcgtccggatatccccttttcaatctattctttatttcctataataaaatagtcgcaatactcgccaccgttcgccagcgtctgtttctggtgcaatatgccatgctagtacatcgtttcgtaaataactgtactaatcacgtaggatgcggatttgagtgtgcggatctaaaaacgcaggcgtagcgggctacgctgaggcttttaggcctgtgcaatcagattcgcagacaagtgagtggtatagttatttcgaaaacgatgtactagtacatcgaatattaaattgttgatagtttaaatagtggctgcctcatccggatcaatttcatccattttatatgtccaatgataaacaatcgggtcagcattgatctcatcgaagtagcgatatattcgttccgatagttcctcttttgaattgacacgaatgccttttaacatctgcttagtcattttgctaagtaatatacagatgaaaaactgaaacgaatgaaaaaacagatacagaccttttaagtacatttcattattttacggcaaaccttccagaaagtggataatatctgcatttctggaagattttcttcaagtggcaaactcgacatatagcatacatactttctgtagtcaaattctatctttctgcatacaccctgacaggtcatatgttatcagttttccgtgtcatgaaatcttttccatcttaaaatcccatcatactaagcaacccataataagcaatggcgatcagcgtaaataaggcaaccataggagtcgttttacgtatcatgcttcccagtgagattttgtaatcttccgagcaaagaaccaggcatatgtgagtaggagaaatctgcattgccacataaccgatacacattaaaagtgtaaacagcgccagtcctgtatgccctggggtgatcacttccattgccataggcatacataatacaatgatcgcctgtgttcccgctacaatggttccaaagaggaacagaagcacaaatacaaggaatgtagggatgggcagcgcagagaaaaactccggcagtgatgtgataacacctgtttctgtaagcagctccttgaagatcatgatcagcagtgtactgagcagtagtctggtctcaaaagcagtacggataaacggaaccagttcttttccattaaaatggtttacaaatacatttaataaaatacagatccacactgcgccccatacaggcaggttaaagatcaggatcaatgcaatagtcagtgcaatggcccagatactctgtgccagaagcttccagtaatacccttttggctgatccggcaccattcctgtatccttaggcacccggcgtagataaaagatccagcctacagcaaaaagtgccgctaccataggcagcatagctaaaataaaggttcctgcactgacacggccttctgtaatccccaacgcaataaaaatgctggtataagtaggcacaaaagcttctgatatatggcggaaataagatgtgatacatgcctgttccggcacgctaaggtcagaatcctttacactttcccgaacaatagggccgcagatcaatactgtgctggcagccggaagcatacctaaaagaaaaggaacgattgaagcatttacccggttattattaaacaggccgttcattgcaacctgggcattgcttaaattttttcttttctccatcattctctgcaaaaatgtaatggaataaaatactaccagcgtttcaacggtagctctggctgtggcgccttttatgattccgtgaaccgctacatctggcgaaaggccatacaaaaagattgttgcaacagatgccgcgatcacagccatccacataggctttttcatccacataacacctatgatcacacaaaatacaagtaccaattttaaaatgtccatctactacacatagaaactgctgcaaaacagttttcctattctgcagcagtccatatctcctttctgttcccagctcaatccttcgtcttttgcttactccacattaaatacgtacttgtctaaacgatgaaatgcctcctgtactcttgaaagaggaagtgccagattaatacgtaaatggcacgggccatggaacatacggccatcctggcatgcaacacctacatcccatgctgctttttccacatcttcaatggtcttgccatgctttttacaccactctgtacaatctacaaacagcatataggttccttctggtcttccaactgaaactccttcaaaatgatctttaatataattgcaggcaaaatcaatattttttgtgatcacttcacaaagctcttctacccattcatagccttccggcttatatgcgccgataagggcatgcatggaaagtacattcatgctattgtagtgggataaagatgcctctttgtctacgcgctcgcgaatatgcttattataaatgatgtgatagcttcctacaagtcctgccagattaaaagttttacttggtgcataaagagccactgtacgctgctttgcatcttcagacacactctgggttggaacatgcttatgtccggttgtaataatatcagaccagatttcatcagagataaccattacgtcatgctttttgtagatttccattgccttttcaatctcccaacgttcccaaacacgaccacatgggttatgaggagaacagaagattgctgcatggatcttattctctacgatcttcttttccatatcatcaaagtccatacgccatacgccgttttcatcttttaccaggtcgctgtggacaatgtgatatccattattggtcaggctgtttgtaaaaccaatgtaagtaggtttatgtaaaagaacgttatctccctttgagcagtatacatttaatgcagtgatcacaccaccaagaacaccattttcatagccaatgcactccggtgtcagccctgttacatcatttcttgtctcatgccatttaatgatagaatccagatactccttgcgggttgaaaaataaccatacgccggatgttttgcacgttcaataattgcctctggaatggtaggtactgtagggaagttcatatctgcaacccacatcggaataacatcaaatccttcttttggtggctttggtgccattggattttgtcccagtgcctctacagcaattgcatcctttcccatacggtccataatagatgtaaaatcatacttcatagtttttcttctcctgttcgtatcatattatttgtaaaaaatatttattttttgaacttatcctattttttatgcctcttcgtaactcacctctacagttgcctttttctcacgtactgtaccaaaaacaaatgctactacaatcacaacaacattgatcagcagtaaatgatgggaaagtctgctggcattcagataaatattaaaagcagatgctactgaaccaagtacagttatcagcataagcacactcttgctacaacggaatctggatttatcccatgcttctgaaacaacagacgggagtttaaatacagagcagttgatcataaatgtaataacaccattagcaaccagacacatatttcctaaaatagaaacgcttaatccggtaaggatacatacaacaccgatcacatagagaatgcctaaaagaacgaccggagtattccattttgaaagttttgcaaggttatgaggaagccatccatcatcacatgcctgcatgataggctttggcgcccaagcaaactgggagtttaaggtagaaatcagcgcaaatccagcaccgcaaaacataaagaatacgtaaacagggcccgaaaggatctcttttgctacaattgacagattctcgcctgctacctgctctacaggaagaacgcctgctgcaacaacagctacgataccatagataacagctacacaaagggtagaaatgatcataaccatcggaatatctctggttggcttctttgcctctgctgaaagatttacaatacagtttgcgccacctactgcaaaggttaaaagtcctccagcctggaaaagccccatcatgccgccagtcatccaggaatctgctgccatatatccaggttttacttctcctacaccaaaggcagcaaaagcagctaacgcaattaccaaacatcctacgatcagattctgcacttttgcaaatttatcaattccaaggcagttaagaataaagaaaatagtcagcactaccaatgcaactacacgttcattaccaaaaccaaataaagagataaaataacttgcaaatgataatgcatacatggaaagacttaagtttgaaaatgtaaaaataagactgtatgctcccgcgtatttcttaccggtaagcatagtgatcattgtatattgcccccccccc

SEQ ID NO: 3710 - DNA, 6040 bp, Unknown
  gut microbiota DNA sequence
acgaccagtcatggctattgctgctcctaatagcgtcataatacctgcaccgatgatctgtccaactgatgctcccattaaatcccaaaaaccaagacactgctttaattgttttgttgaactccctttacactctgccatatttctctcctttttttcgtctgtacctcccttctcctgacaggcacagatggactgtagctttgggatactatcatacgtctataatagtattccacttttcttgtatgtactaaattattaagctgcttaatttttaatgtactttatatatagtacattttattcaataaatcaagatatattttagattttttataaaatatttacatcgtcatttttagatttcttttctttttacatagtaaaggcagataatgcacatttttctgcatcatctgccctttattttttagtcaccattattatttaagaagctgttctaactcctgtggagtcggtacatctgccccatcttttccatattttgcataagtaatggtcagatcagactttacaacaaatgcagctggaagttgcagttcctctccttcataatctccatgggaaaatagctttcttgcttccgttaccttagctactacatttccaccaccaagctcttccttatcttttgccgggttgatttcaaattctttgtaaagttttccttccgggtcacagatgatctcaaaaggaagtgtttcccgtgtcatctgcttcttaatgctttccggcgtcgattgcaatactacaaaaagcttaccagtatctcctacaatctcctggtaatgttctgcataagtatggatatcatactgacacaatgtacatccatagtacctgagaaatacgattgctgtctttccttttcctacacggctgcttaatgcctcttctggtccaaatgcacctgctgctgtaaaatccagcattttttctcctactgccaatcttgccataacaaatacctcctctgtatgatcatattgcttaatatttaagctgctacactataactgtaacaaatttcaacacgaattacaaggtacataatgcgaaataaacaaaaatatgggcactgtttaattgactttacccccactcctcctttataattatgaagtaagaaataaaaaattagaaaaggaacttatattcttatggataatcagcatatagatgaacgctatgaattatattgtaaaatgttagatgaattagacgaaagctgccgccttatcatagactatgattccgttcctcataactatggatctgccaccctttatcaggccgaatctcagatcatccatcaggttggacaccgcccaggaatcactgccaacgaaattgccgcaatcttcaaaaaaactcccagtgcctgctctcaattaataaggaaacttaggaaaaaagaactgatcactcagaaaaggaataaagaaaacaaccgtgaataccagctgtacctcacagaagacggtgagaagatatttagggaccatgaccattttgaaaaatgttgttaccagcgaagctatcagaatctaagcagcttcagtgaagaggattttaaaacatatatcgccatccagcagaaactaaacgaaacatttgcaatggatgtagaggaaagcaatcgtgatcttcctgctattaattaccatcattgaacattttgttctgctatatcgtgaactacatcggcaattgaattaccgagcatctgattacgaagcatagctccgtagcttcagaggtgcgtccataacacccatactgctacccagatgggttacacagctgcttttattgtttttgtactgctcaacccggttacgggcatatcaatttctttgccggatacggcatgatactttctcaaaatattataaactcctactgcatctgcattgtagatcacagtatctacaatgcagatgccacgcttttttcgaattgccgatgtagttcaccaatcccctgacaagttaggctgctattccatatccatattggcaagctgcctaatttgatcgcgtctgctatagataactgctgttacttgaactctgctgttttcgtcatcaacccaataataaatcagaaaattcttaacgacaatcttacgcattccctccgtcctccaaggttcttcatcaatcaaggcatgttttttcggaaaacacgacaacttcataatctctgcctttatcttatcaagcagattatccgctgcgtccggtaccatcagatcatttgaaatataatgcattatctctttcatctgctccaatgcctgccttgttacccttacctcatattcatccatgtactatatctccacctttaattgattaaaagcctcatcaacagatagagaatcattcctctttgcctgtgcaagtccggtctgcatcatagtattaaattcagcttgtgttatagaatctcttgtagcaagcttatctggaatatcaagtgaaaacggtactccatcacgcataatgacctgcctgtatgtcatatctatgaatacagatacagggattccaagtctctcaaggatcgcctctgcttgctcttttatattcggttgaattcgggctgttacatttgcagtttttgttgccatagtatgcacctcctgtttcttacagtgtaccactatgtatagctttttacaatacgaatcacttgtatttttctaataacactcttttctcattacttttatgtaaattgatttcatcaaatcaatttcatagcttcatttttctttgttgcaatagtacgtaaccctcaaacaacgcaagatcctcttttgttgtaattttaatatttgtctgatctccatacgcctgatacaatctatctccaagagcatacatcaaagaagttgtatgcggttcgaccttctcaattaatcctttcttttttgccctctcgtacacattcagaagataatcaaatctgaacccataaggacatgcaatctgaatatatttatccctatcaccccatgtcttgctagtagcattttcgtcattacttcctaacaactgataacatggcgtagctgtaatagctgatcctttatctttcatcacacggatcacatcattgacaattttatccgatgtaaacggtgcagccccatattgaatcataacataatcatcaggcttgattgtatcctttaaattattgataccgctcattacagaatcttgaaaagtatctccgccatctgcaatccactttactttgctcagaccatattgttcgatcattcccataagatactctttccatttcttatggcaaacaacctctattgcgtctatctgaggattattctgaaaaatttcaattgtgtatgccaaaactggttttccaagtacttcaataaattgcttcggacgccctgtacccacacgagagccaactccacccgcaagaattattgctgtgaccattattccttttctccataactttccaatgcgaagtcaataaatctcaccaaatttctgtaagatggtaagaagaaaaaactgtcatcatcaccaacgctacctttataaatcccccagcagaaccaataaaacgccgaaatagggataaatgcaatataataccgatgttcatcttccgttaacgttctaccaacaaaagcctttaggtatctctctatctgctcatccgaccaatcataacgacataaaatacatccaatatcattcgccgcatagtttaaaccagtgtattcccaatcaattaggtagatttctccttctacccaatatatttatcataacattatctaaaaaaactccatgcttagattcttgcttttttcttgcgattacattgataattaacttctacaccgcacctcttcaaaatgaataaagccagtactggatatcaaatcctgcaccggctttattcattttaaactgttttaggctgaaaaagttgaactaagctaaagcatgcccagttacttaatcagcctaaaaagttcttctaaaaaggctcagagataaccatttctttatttctgaattttagatataatttctttcaacatcccatcgaccatttgcttctgattttctgttacctcaagcgctggtcgtttacatgtaagcggaaacggaataccgattacggacaacccatatttcatagccggcatgaacggagtggaaatagcataaaaatccattaatgcatctatcgtctgctggatctgtgcgcttttttccatgttatcatgttcaaccgcatctacccattcagaacaaagtttagggaaaacattagataatgctgcaatacagccatccccgccactgctgactacatgtgcaaaattatcatcatagcccgaataaattctaaactccggatattccggtttgatcctactgatcaatgtccttgtatgagacggagcaccgaacgtatcctttaatccaataatgtttttatgctttttaagcagctgcaaaattacatttacggacaaatcaaatcctgttctatccggaaaattataaagaatgatattaccattaattcgttcggatacataatcataatactcttctaccccggcgtcgtctgttcctatataatatggtccgacaatcataaccgcagttgcgccctgatccagtacataattagagaactggattgtctcatctgcaatcaaccgacctgttcctatgtaaactggaattttgccctttaaatatgcgatagaatctctggcaaatgccattgcctcttccaatgtcatcgcataaaattctccagaactacccatgatcgctattccattcaatccgccttctataaggtgatcaaattgccttttcattgcctccatatcaacttttccgttttcatcaaatgcagtcagtaccggacaaatatattctgctctcatctgtctttctcctagttctatattttttgatcatcacatatagttgcaggcacgggaaattgctgtttcaatgtatccaagtgcctcagcttttaccagccttccattgcaaatgtcaatcacatcccgcataaattgatctgtaatttcttccatggtttccggtccataaatcacatggctagcatcgaagtcaagattgtcctgcatcgttttataagttttcttatttgctgtaattttcataaccggtgctactgcatttccagttggtgttccaaggccagttgtaaacacaacaagctggcatcctcctgcaatcaatccagctacagatgccgcatcattacttggcgtgtccatgatgatcaaaccttcacctgttttcagctgctctgcataatcgtatacagcattgatcgtactttttccacctttatgaatgcaacccagtgatttttcttccagtgttgtaagacctcccgcaatatttcctggtgacggatttccgttccggatctcctgcccgattctttttaatgattcctcatagtcatacacaattttgtaaattttatcatgtacttctttattggcagcacgccttgccagaatatgttccgctcccagaaattctgtcgtttcacaaagcaccgatgttgcgcccatttccacaaagcgatcgctcaactcaccaacaagcggatttgaacctagtccggatgatgggtcactgccgccacagtttgttcctaaaatcagctcggagatagggaattcttcccttcttaaaagtccagcctctgctaccatttcctgtgcgtaacgaactcccttttcaaccgttttgatcgtaccgccttcttcctgaatgatcagggttttcaacggcttgttggttctttcacgaattgcttctactaccaaatccatctggcatccttcacatcccagtgaaacaacaacggttccgtaaatatttggatttgcagcatatcctgccagaacatccatagtcaacttcatatccggcggtacctgagaacagccatt

SEQ ID NO: 3711 - DNA, 3759 bp, Unknown
  gut microbiota DNA sequence
tgtaccgccttcttcctgaatgatcagggttttcaacggcttgttggttctttcacgaattgcttctactaccagattcatctggcatccttcacatcccaaggaaacaacaacggttccgtaaatatttggatttgcagcatatcctgccagaacatccatagtcaacttcatatccggcggtacctgagaacagccattctgattattaaaggtaatggctccttctacctgagaagcaataatccttgtagtatctgatgcacaaatacttgccggcagaataagcacgtgatttcgaattcctaccttaccatctggtcgtttataaccccaaaatttcataagaatcccctcctcaatctactttcttttctctgatgcttaaaacgttgtgtgtatgaacatatgatccggctggaatatcacaggccgcttctccgatgtactcgccatattttataatttcgcttccggcttttatcggaactctggcaattttgtgatacataggaatatcctccagcacttttacctcctctgatcttccattcacctgatacaccgctttcgttcctttcgaaagcggttcaattgctacaatgacattatccttttcattgatcagcattgcatttcgcataatttcctgcctccttattcttgacagatatctatcttgagcattatagttctatagtataatataagtgttatttatagaaaggaatttgccatgaccaaagacgagcaccgctcaacagtacgtgtgttatctatattgttagcattatcaaacaacccagacggactgacccttgcagagctttcccaacaacttgctgcacccaaaagcagtctgttccctattgtacatactatggctgaccaaaattttgcttcttacaatgaggtaactcaaaagtacagtattggtttaaatgcctatctgaccggcattgcttatatggaaacacataatatatttgaacggcttcaagaagaaatgaagtcgattgtcaatcagtgctccgagatttgtcagcttggcattctggatcattctgatgttctctatcttgcgaaagtcgattcgccagaaccaatccggctgtcatcttctatcgggaaacgccttccggcatactgcaccagccttggaaaatctctgttatgtgaatgtacaaaagaggaactggaagtacttttccctaatcctctgattccatttacaccaaatacagttaaaagtgtggatgaattatacaagcagcttcttgtggtccgcactacctccatagccattgaacgtggggaaactcatccagacatctcctgtatctccaccccactgttccacaacggaaaaccagctgcttccatcagtgtcagcataccaacattccgtttcacaccagaaaaacaagcacaaatcgagcagattcttatttctgctaaaccacgttttgaaaaacttttggaacagaatgagcggattttttaatataaccactctgcaaaatagtaagaattgctgcaggccgccttttacgaaaacaattttctccaaagccagtctgcagcatatcagttaaatatcaaccatataagatgaatgattaacctaaataataagcttcaacagcattatgatagaataccatttctaattctttttctgtaaatacatcggattcaataataaaattatataaatctgcgtatttaaactttgtcataacacatggtgaatcggtaccccagataattttttcggttccaagaacttcctttgccatgctgataaactttaacgcagttggatacggatatgcctctggacttacattccatggaagtgctgataagtcaatccatacatttttgtgtttcagataaggcaaagctttttccaaagtcgctccatcctctcttcttggtgccagtaaatggcagacaacgatatttaaattaggatatttctgcgctaaacggtctacagcctctacttgacagctttccatgaaaggactgccaatgtcaagaaccaacgttgccttctctacttttgagattttttcaaaaatttttccaaaaggttcgccgtcaataataaaattcttgtgatatcccatcataccacctccaacgctcacctcaaatttaaatacttttgcatgcagatcattgatgaaatgattaagaatggaatctgcctccttgcagaaagcatccagtgttacagcagccttaaaacgatccggatatttttccgctgtttccatagcatattcattctgaaatccgtagaggcttccctgcaagagaattgctttttcgacatcttcttcatccataatcttcagcaatgtttcggccataaattctttatctccgtatcctttcggtatgatagccatttcatcgccattggcccatcgacatacaccgtttccaattggtcttaactcgccgcatttcccaaaacttgcaatacgctcaaaaatgtgtgcatgtgcatcaatcttcttcatagttagatctccttttcattgttatttaaatcaggaattgctaccatcattgtaaatacaaatgctaacccaaaagcaaccaccagtgaaattaaaaacggaataaaggcatgactcataaataccgacaatgtcgtgagtgcaggcaatgcaaatgaaacggccctgcatccaaaaaatccggctacggcacttccgatgccgccagccacacaggcacatgccattggctttttcagtctaagatttacaccaaacatagctggctctgtaatgccaagcaaagcagttaatgctgcagataatgcctgggatttgaacgttgcgtccttggccttgactgccactgcaagagctgcgcctccctgagcaaaaatggccccgccgaacaatgccataattgtgtcataaccatataccgccacattgttcagcgcaattgggaagagcccccagtgaagccccaaaataaccataaacggctgtaaagcaccaataaacataccggccaccatgggacttaaattataaatccactcatatccttttgccaaccagccgccaacaaaacttccaagcggtccaaatacaagaagcgtaacaggaacaatcacaatcacgcaaaccggaggcgtaaacaaatatcgaaacgtttccggtattaccttataacagaacttctgaacaaaactcatacagtaaatagccagaagaatgggaattacagaagcagagtaagtcacagttttcagaggaattccaaagaaggtggctgttccctctgttgccataactgtagtcatactggggtgtaaaagaatacacgcaactaaaattgccgagaacggttctacatcaaatttttttgctgcagtataagctaagaacagcggaataaaataaaagaacgcgtcgctcatggcattcagaatatcataagttgctgttccatctgtaactatcccatttgcaaccataagtaccaaaataccttttaatattcccacagaaaccatgagattaataaaaggaagaaacaaagaagatagcagatcaataacatgcgctactccttttttccatatgttttcacttttattgcttgaatctcccatagaaatttcctcccaccgtacaacaacggaacaacagtaataaacgtgttttccgagttttattttgcagttgccgaccagaatgttaaactccagattaagttacaaag

SEQ ID NO: 3712 - DNA, 527 bp, Unknown
  gut microbiota DNA sequence
gaaaaggccgcttgacaattgaacaacctgcttttcagatgtccacacggcatattttaaccccatcatacagttcccaacaaaaatatccttaaaggagcccctaaaaatgaccctatccaaaatccaccacattgccatcatcgtttccaactacgaaactgccaaagatttctatgtaaacaaactaaattttccaattatccgtgaaaactaccgtccggaacgcaacgactggaaactggatttgcgagtgaatgagtatacagaattggaaatcttcgcagaaccggatccgccaaagcgtgtgaatcgtccggaggcatgtggccttcgccatctggctttttgcgtggagagtgttgaacagacggtaaaagaactggcagaagttggtattgattgtgagccaatacgtgtagatgcttacacaggcaagataatgaccttcttccaggatccggacggtctgccattggaactgcatgaataataaagtgaaaatggtagtcattatacctgacaat

SEQ ID NO: 3713 - DNA, 1558 bp, Unknown
  gut microbiota DNA sequence
gctttcagaccgtagatgatgttattttttacagtcatatgcgggaaaagggcgtagttctggaataccatggatacgccgcggtctccgcaggcaacgttgttgactacctggcctcgcatatgcagggagccggaggtgatatcctccagaccggcgatcatgcgcagggtggtggattttccgcagccggacgggcccagcagaatcagccgctccccttcccggatttccatattcagatcattgacgatcacattttttccgtatgcttttacgacgtgttcaaaaacgatattattcataaatcctcctgacagattaaccttttacgccggatgcggcaaaggtgttgatgatatagcgctggaaaataagatacagagccagcggaatgatcatggtgatgacggatacggccatggcaatggtaaattcggtgccgccctcagcgctgatgtacatctggagcgccagggaaagcgtgtagttttccttgctctttaagatgagcaccggccatacatactcgttccaggaattgataaagaaaatgatcccggttgtaagaatggacgggcgtaccagtggcaggatgatatcgcgcatgatcttgaggctgccgatgccttccatccgcgcagcctcaatgagggccttcgggattccgcgcatggcctggcgcagcaggaagatacctaaaacatccgcaaactgcggaagtgccacgccccagatgcaatcccgcagaccgatttttgaaatcatcaggtagtttgggatcatggtcacggtgaacggaataaacatggtactcagcatgataaagtagaaaaactgttttcccttgtactcaaaatagacaaaggaataggcggcaaacaggctggtaatggttttgaaggcggtaacggatgccgcgatcagaaatgtgtttaaggttatctggacaaaaggcagtttttcaaatacatgccggtagttttccagagtcgggtgagacggaatgatctcaaaaatggtattaaatgcgtcctgcagagtcttgaaggaattggacagagcgaacacgatgggaaccagcatgaggaaaacgatggcgcccaggatcatgtgccagccaatttccgaatgattgttagttttcatagtagactcccttctccacaaatttaaattccagaagtaaaaggacaatgaacagcagcatggtcagaatggaaatggccgatgaggtgccggtccgatacaaggtaaaggcctcgtggtaggaagcgtagatcaggttggagctggcgtagttcggtccgccctgggtaatgaccttgatgggagtgaacacatactggagtccctggacaatggtggtaatgaacacgtaaattccggtagcggagctcatgggcacgatgatgtccagaaaaatcttccacaggggaacctgatccagccgtgctgcttcaataacttcctgggatacgccggagacaccggctaaaatattgatgaagttgtagccgaaggtcttccaggtggtaatgatgcagagcacggcaat

SEQ ID NO: 3714 - DNA, 197 bp, Unknown
  gut microbiota DNA sequence
gtctcacagcactttgcatggctggtgccatgatctctctgaccggatgcggttcatccagtcagtctacttccgcagataccacagcaggttccgcctcttccgaagccaccacttccgccgagagcaccgcttccggcaatggttccaaaaccgttatcgagtactggcactgtaatgcagagaaccagggcgga

SEQ ID NO: 3715 - DNA, 197 bp, Unknown
  gut microbiota DNA sequence
gactggaccaatgacgataagaacgacaaacactgcgcctgtcagcagcataaaggctgcgtatatcataatcgacgagtaatcgctgaaaggcgatgccgcttcccgaagcatcactccacaaagcggaatcaccaacgcagcttccagtagggagataccacgaaaaatggcattctggcaaaacagataataaa

SEQ ID NO: 3716 - DNA, 1345 bp, Unknown
  gut microbiota DNA sequence
ttgtttcttcaagctccacttctttttcgatcttaaatatttttgtaaaaaatgaaatggcctttgaaagaattccttctttcttctcttcctccagttccggaacatccagatcttctcccgtcagctccgcatactcggactccgtgatactatgaacggcgccctgctccactctactcgtggaagaatctgcctctggagctgcatcttcgttgatctggatatgattgctgtattcattcgcaaaaaatgaatttgcaccattttccgaagaatctgttgtgatcacctcaattggaaggtcatcattatgcagatcgtggagaatatacccatttcgcgcggtatcctcctgataggtatagctgtatttcaaagcaataaatttattgtatgtcgcttccgcatcctgcttacagccagaattcacataggaatcctccccggatgccgaactggtcggtcctgcattcggagtgcttccctcctcgccgccgcttgatgcaatggaagagatttctccctggctgacttccgacatcagccaatgaaagtggactccctcataggtacctgcagatgcagtttcgtcacacgcatcaaaacattccaaccagccacttgcaagtcttcggttttcttcctttgcttcatcaatttcgtcctgatttgtaacttctccttcctcatcttcttcctcttccgggacttcgacaaaagccggtgccggatgtccatcacagaaggttttatcgtaatgatatttgtgctctacagtattggatgcatagccttcttcattggtcgtaacggtcgcaacaaaccgataatcatcccatacaaccggattatccaggtattttgacagatacgtttcatgatctgttccgccatacagttctaccgcaccgtcacgttccaggttgacctggtccttatcatcaaaacgctcataaagccggaaactcgattcctccagagtttcccctgtttcgtgatcatacttagtcagctgtgtattataagtagaagtccagtcctcctcatgccgataacagttaaattcaaggctgccactgctggatgttccagaaggatacgatggcgtatttccaccattcccaccaaaaccttgctggccccagaaaattcctgtaccaaaaactcctgatgctcccacggacgcataatatacactacttggaagagccatttccacgtatgccagtctctgatgctgctgcgccggcactaccccaattcgcgggaatttcttatgctgaccagcacactgctgaagcacccacagctgcagacactgttcatacaaatctctggccga

SEQ ID NO: 3717 - DNA, 280 bp, Unknown
  gut microbiota DNA sequence
gcaaagccggatgacattgaggcttacaagaaattaaaggctgcgggaaccaaactctatgcacagtatgtacctgcagacgcagaagtttctattgatgaatttctgaaataacaaagggggaaattgttatgcaattaagtgctttacaaattgtactgcttgtcctggtggctgctgaaatcaacgttgaccgccgcggattatcactgacacatgcaagacctgttatcgtaggtttcctgtgcggactgatcttaggcgacatgaacagcggtct

SEQ ID NO: 3718 - DNA, 1279 bp, Unknown
  gut microbiota DNA sequence
atggagaatttgattgcaataatttcttttaaattatatatgtctttttgactatctttttatatcttcttaaatgtccgcaaagccttattttataggctctacgggcattttgcttttgtggtaaacctcgcatatctaggtctatcttcttatattttctctatcaatcgttgttaaaatcgtggtaaatacttttatgcgattagacgctgaacctctgattttgcggtatctatggacgcatgagcgtaccaattcattgtgatactaatgtttgaatgccccatgatatactgtaaatcttttgggttcatgttcttgcttgccagccttgtgcagaacgtatggcgtagcgtatgcggtgtgatatgtggcaagggattgtctttgtggtgcttgttgtatttctttaccatacggacaaataaggcgttgtaatcaatcgcaacttttggcttgcccttatgattgacaaataggaaattgccctgtccgtctatcacaaatggttctgcctttgggcgtttcttcataacccgttgaaatgcctgtatcgtttctctgcttaatggtacttgccttattccgcttttcgtcttaggcgtttcaatataatagccttgttccttgctctttagtaactggtggtcgataatcacaacttcattcttgaaatcaatatcggctactgtcagaccgcacagttccgagatacgaagtcctgtttttaacagtatcagcacatcatcataatgcttgtgatacacattgtccgtcttaataaatgacaataaggcttgttcctgttcctctgtcaatgcgactttctctttggtatcattttctaggacttcatttaacttgaaatcaaaagggttcttccttacgcaatcgtcttgtatagcgatatagaatgacgcttttaacgagcgtttatggttgttaatggtattgtaggaaaagcctttgtctttcatgcgtaacgcccattctttagcgtcagagggcttgattgtatcaatgctcctagcacctaacttatcctcttttaataaccgcatgagttgttcccgttgtttcattgtgcttttcttcacatttgccctctgtgcgttctgtttggcatagagttggcagagcgtcattttcttgcctgtgctgtcgataccgtcctcaatatcccgtcttatctgctgttccagttctcgaagtgagggtttttcccgttttccctttggtgtcgggtctgtgggtgtcaatctccaagcatacacat

SEQ ID NO: 3719 - DNA, 307 bp, Unknown
  gut microbiota DNA sequence
gcaagcccggaaggcattcaggctatgcagatggttgctgacctcatcaaggacggagccgctctccatgtttcctgggatgaaggctgccagagctttattgatggcaactgcgcaatgctctacaccaccattgcccgtcgcgcatccgttcagaagagcgcgcagttcgatgtcgctaccgtaaaatccccgacatggggcagcaacccgcgtaaagttccggcaggcggatgcttcttagctatcaccgcacagaccgatgagcagaaggaagccgcatgggagtttgagaaatacctgtaca

SEQ ID NO: 3720 - DNA, 750 bp, Unknown
  gut microbiota DNA sequence
agaggtagtcttatggacccaacggaaaatccgtacatatgaaacggtccaggacacaaagatcccaaccataagcagattaagaagaagcagcatggaatccgaaaacaggttccctggattttgcaagtatcggtataccgcccatgcctctaatacgatcagaacagggtaacaaaacttcacagaccaggtccaggaaagtgacttctggatcaggaactgcttttcttcggtcatgtcacctgtgcgctccactgcatcatccgttgtataaaaaatctgccagaaagtaccgctgcattcaaaattccagccggcttcctggcactgcttacggaactgctctgctttccagctttccgcgcctgtgagggaagaactttccggaaccagaagggctgcatatcttctctttgccggttcagctctatgaaacttcatgacagaaccgccaacgctctccagaaaccagccctgcgctgccatttcttccaggtactgttcaaatacatttgcctcccataaattaaaggaccaccagactcgcttcttttgtttcatcatgtcatctcctttccagggaacagccgaattttcgattttgcatctattttcattatagaaataataggaatatctgacaagaaagattggattaacaatttcttacatatttctattgatcagttggaatattcaaattttccatatacgggcattctgaaaggaaaaaagtattggaattgg

SEQ ID NO: 3721 - DNA, 1321 bp, Unknown
  gut microbiota DNA sequence
acagaaacagctaaaatgtatggcccgggctacagcatatctcagataaagaaaaatataagaccggcgtaacggaccggtctcatttcgtggttcaggcaggtatctacagtgtttctgcccgatctgcaatatgctgtttgaaattgatcacttcatgcttgtaatcacgattcatataacaggatgtaatcataaaatccgcagtggatttattgacggccattggaatatcgtagacctgggaaatcctcatcagggcttttacatctggatcatgaggctgcgctgtcagcggatccgaaaagaaaatcacgaagtcaatgacaccctccacaatcttagcaccgatctgttggtctccacctaatgggccgctgttataaccttttactgtaagtccagtctgatccgtgatcatgcgggccgttgtacctgttccgtaaagattatgcttctccagctcagctttgtgttctttacaccatgcaatcagtttctgtttttcgttgtcatgagcaatcagggcaatattctttttctggccgattgtaaaggtaatgtattcttgagacatggaaaaatcccccttatctaagtatggaaagtgcagatagatacaacttatcacagaatggtttattacacaagtgcaaaaatatcaaactgaagattagaactcaaattattagaatttcctcagaacagtcaaaatcagaagatttctccgaatatttgattttgactgcagtataagaatcgaatctttaatccaatcttttccgaactctcacatcgaagaaaatccgtattcattatcaccgtactcgatgctgataatatggtattttgtggaaataatctattgcccattccctaatcttaacattccgctaaaatcaaaaattccaaacttccaaatttggtatttttcttagaattaacatacttaacaattatttgcatttttcctagtttctttcttaaaaacttacaatgtttttactgtttcatgatagatgtcaaggccatacaacactataatcggaaactgtgaaacacataaccaatcctattgccagactaacatgaggagaaaaacattatgaaaaaaaatctaaaatgtctcacagcactttgcatggctggtgccatgatctctctgaccggatgcggttcatccagtcagtctacttccgcagataccacagcaggttccgccacttccgaagccaccacttccgccgagagcaccgcttccggcaatggttccaaaaccgttatcgagtactggcactgtaatgcagagaaccagggcgga

SEQ ID NO: 3722 - DNA, 280 bp, Unknown
  gut microbiota DNA sequence
agaccgctgttcatgtcgcctaagatcagtccgcacaggaaacctacgataacaggtcttgcatgtgtcagtgataatccgcggcggtcaacgttgatctcagcagccaccaggacaagcagtacaatttgtaaagcacttaattgcataacaatttccccctttgttatttcagaaattcgtcaatagaaacttctgcgtctgcaggtacatactgtgcatagagtttggttcccgcagcctttaatttcttgtaagcctcaatgtcatccggctttgc

SEQ ID NO: 3723 - DNA, 272 bp, Unknown
  gut microbiota DNA sequence
tacttcatgtaatgcatccgtcagtttagtagattcataaatcggtatgaatccctgcccctgcacatctgcaaattcatagtctcttaatgtcgacaataactcttcacatgtatatttccgctcgagttttttttcgagcagacgataaatgaacagcgctagaaaacagatcaggaaatgtgctcggatccggtcgtttcgctggacaaaaaccggacgggcagaaaaatccgttttcatgatccgaaagcatgcttcaatctgccaac

SEQ ID NO: 3724 - DNA, 207 bp, Unknown
  gut microbiota DNA sequence
atctgtaataacacctgtcagtttacctgttgatggatctacactgctgatacctccatcctgattcagataccctatccggattgcaccatgctgcccgatccactcactttcttcttttgaaagaaacgagctgctctgtgcagaaagataacgcctgtagagatcatctgtgtaaaatgggttgtcatccttgattctgcgcat

SEQ ID NO: 3725 - DNA, 262 bp, Unknown
  gut microbiota DNA sequence
ggcagcatggtgcaatccggatagggtatctgaatcaggatggaggtatcagcagtgtagatccatcaacaggtaaactgacaggtgttattacagattatgtggatcttgcagaaaattgtctgcaaggtcagactctggaatttgaattaaatggatatgagacaagaagtgaactgcttcaggcattgcaggatggaaaaatagacctgatttttcatgcaaaccagaatccatactttgcagaaacaaatggatttgc

SEQ ID NO: 3726 - DNA, 1088 bp, Unknown
  gut microbiota DNA sequence
taaacggtaagatgatcatcgtttttagatacttctttctttgactgtccacatccagacaagacagcagttgctacaagtacacctaacaccactgcaatcagacaacgttttgcctttttcatacttttattttcctcattctttcctgataaaatcattgttgttacgtctgtgaaataactccgtaaaaaaacactgtcaaacagacagtgcacctcattttttgcaactggctgccattttacaggctctgtagctttgcgtcccagactttcatctggtttgccgatttccttattgtaccaagttcaatatcgttaaaaattgtacattaaaactttccaaagtaaattcccgtaagggaatctgccagagtaaaataccgctatctcttttgaagtaaaccttccggcttcttttccattctttgttacgatactctcctgtacagacatcacaaagttgagataatgaccgaaattattctgcatttctgttgctgtagcagtaatcatacgcattcttttttccgttactgtgaggctctacgccctgtaatctttcgcttacaatataattgctttcataatttcctgaacggtattgcaggtatcttcaaaagaaatatcttttgcatagtcatattcgcgtctgtatttttcccacaacttacgaagggtatcgctttctcggatttctttcaagatttccatgtagtccgtaagaatcgctccgctgccgcgcttttttgttgtccgttccagagcctggcgtagtgtttctttatcacactcttcaccgcgcagcgcatacaggatatgtatgtcgtaataatctctcggacgggtatttgcaatgttgcgggataacaccgtttccagcttttccgccagcaccgtttcaagattgtaggcaagaatactgatctggcgatcatcaaacagcatggaaaatgtgtattccacctcacggggcgttatcatgtcacccgtagtaacatccaccgtcagcggtacactgatcggcggatagtttgctttcagcccaacccggatgccgggataatcatccgtttcccgtatatc

SEQ ID NO: 3727 - DNA, 402 bp, Unknown
  gut microbiota DNA sequence
gcccgtagtaacatccaccgtcagcggtacactgatcggcggatagtttgctttcagcccaacccggatgccgggataatcatccgtttcccgtatatcagaaattccgacaaccgcaaactgcacatcatcggcaatctgtacagtacagatatccgtaaaaattttccggatcgcttcatgggtcagagtgaaccctttgattgtcgtgtccagatccatggttgcccgcgtatccagccctacaatagcagaaatcaggaaaccgcctttgagaataaaattgtttttatagggcgaaagtgaaattcgttccagcagtcgctctagcatatagttctgcatgacaagctgtgcagaaatatgcttctctgctgccttatttttgataaaggcttttaa

SEQ ID NO: 3728 - DNA, 197 bp, Unknown
  gut microbiota DNA sequence
ccacaggagatcatcgaccagtatgatgcttctgacaaaaccttcctgaccgacaatttcctgccaaacgtcctggatctggcggtaaacagtgatggtgtacaggtcggaataccgtattctttaagcagcccggttctctacatcaaccgcgatctgctgaaggaagcaggactttccgaagagggaccgaagac

SEQ ID NO: 3729 - DNA, 272 bp, Unknown
  gut microbiota DNA sequence
gttggcagattgaagcatgctttcggatcatgaaaacggatttttctgcccgtccggtttttgtccagcgaaacgaccggatccgagcacatttcctggtctgttttctagcgctgctcatttatcgtctgctcgaaaaaaagctcaagcggaaatatacctgtgaagagttaatgtcgacattaagagactatgaatttgcagatgtgcaggggcagggattcataccgatttatgaatctactaaactgacggatgcattacatgaagta

SEQ ID NO: 3730 - DNA, 197 bp, Unknown
  gut microbiota DNA sequence
gactggaccaatgacgataagaacgacaaacactgcgcctgtcagcagcataaaggctgcgtatatcataatcgacgagtaatcgctgaaaggcgatgtcgcttcccgaagcatcactccacaaagcggaatcaccaacgcagcttccagtagggagataccacgaaaaatggcattctggcaaaacagataataaa

SEQ ID NO: 3731 - DNA, 269 bp, Unknown
  gut microbiota DNA sequence
tggatcgggcagcatggagcaatcaggatagggtatctgaatcaggatggaggtatcagtagtgtagatccatcaacaggcaaattgacaggtgttatcacagattatgtggatcttgcagaaaattgtctgcaaggtcagactctggaatttgaattaaatgggtatgatacaagaagtgaactgcttcaggcattgcaggatggaaaaatagacctgatttttcatgcaaaccagaatccatactttgcagaaacaaatggatttgc

SEQ ID NO: 3732 - DNA, 211 bp, Unknown
  gut microbiota DNA sequence
atcaactttttaacatgagagtttgatcctggctcaggatgaacgctggcggcgtgcttaacacatgcaagtcgagcgaagcaatttaagtgaagttttcggatggatcttagattgactgagcggcggacgggtgagtaacgcgtggataacctgcctcacacagggggataacagttagaaatgactgctaataccgcataagcgcacg

SEQ ID NO: 3733 - DNA, 219 bp, Unknown
  gut microbiota DNA sequence
gggcatgaagatcactaccctgatcctcattgttatcatcttctccatgatctgctctgcactgggaatcctggcttgatcatttataactaacataagtaaacggacatgtcgcctgatggtgacatcaccataatgacggttctgcctgtcttatttggcaggcagagcccttttttattcaactaaggggagattatcatatggttgaagtaagcg

SEQ ID NO: 3734 - DNA, 197 bp, Unknown
  gut microbiota DNA sequence
aacaattcttttcctccacccacagaagattttatttacccgcattgataagaaaaatgtccctgttatcaaagcaatctgccagaatatgcagaaaacaagcgcgatggtgattgccctgtcaggtatgtaataccagccgccacccagccaactttcgccagtaaaaaagagaacagtaagtacaccaatcatgc

SEQ ID NO: 3735 - DNA, 241 bp, Unknown
  gut microbiota DNA sequence
gatcagactggacttacagtaaaaggttataacagcggcccattaggtggagaccaacagatcggtgctaagattgtggagggtgtcattgacttcgtgattttcttttcggatccgctgacagcgcagcctcatgatccagatgtaaaagccctgatgaggatttcccaggtctacgatattccaatggccgtcaataaatccactgcggattttatgattacatcctgttatatgaatc

SEQ ID NO: 3736 - DNA, 346 bp, Unknown
  gut microbiota DNA sequence
cacacccgttcccatcccgaacacgatggttaagacctaagcggccgatggtactatactggagacggtatgggagagcaggtgagtgccagatcataaccgggcttatagctcagccggttagagcgcacgcctgataagcgtgaggtcggtggttcgagtccacttaagcccacttgagttgaaaaactcatacaaatgaatacagggattgctttttgaaaaacaaaaaggaagacccgcatccaatgggggtgtagctcagttgggagagcacctgccttgcaagcagggggtcaagagttcgaatctctccatctccattggccgaaaggccgttcgcaaa

SEQ ID NO: 3737 - DNA, 1046 bp, Unknown
  gut microbiota DNA sequence
cccgcgtaaagttccggcaggcggatgcttcttagctatcaccgcacagaccgatgagcagaaggaagccgcatgggagtttgagaaatacctgtacagcgtggaatccatggctgcatggaccatcggaaccggttatgtaccgccaagaaaggacgttgcagacgcagagaacggactgaaatccttcctggctgaaaatgagatgatgaaggctgccattgagcagatggacggcgtggtttcctggacatccttcccgggtgatgcaggtcttcaggctgagcagatgctcctggatatgagagatcagatcttcggtggacaggtaactgccgaggagggtatgacttccacccaggatgccatcaatgccctgttagacgcacagtaagctgacattccagatgcagaccggtactttcccttttgctcacgggaaggtaccggttttcctgaatttacggaggtaatcacttgaataaagaaacaaaaaaacaaacgattctgggatatctgtttctgatcccgtccctagccgtgttcgcagtctttatgttttacccactcctttataccttttacttaagcttttttgagtggaacatggtaaagcctgtcaaaaaatttgtcggtctgaacaactacattgccgtattccgagatccgaatacctttaagattctgggcaatacccttgcttacattctggttctgctggtcctgaactttgtgctgccgtatattctctcctttatcctctccgccgtgatccggcatggaaagagtttttacaaggctgtgttcttccttcctagcgtcatctccctggtggtcggctccatcctctatacctggatcttaaacccgatttccggaccggtggccatcattctcggtaaattcggcatccagatgcccttctggtccaaaaccgacggatgggtcattgccgtgctctgcatcattaccacctggaagaccttcggctacaacttcatcaatattttagccggtgtctccggcgtatcccaggaagttattga

SEQ ID NO: 3738 - DNA, 250 bp, Unknown
  gut microbiota DNA sequence
gctataatggtattgaggtgaaaaaattgaaggtcaatacatcaaaatcaaaaaacgctgagtctttttatataaagcaatcctacatcgacagtaacggaaaatctacctctcggacaatccgcaaacttggaacattaaaagaattgttagttgaacatggtcccaccagagacgatgttatggcctgggcaaaagaacaggctcgcattgagaccgaaaagtttgaacaggaaaaagcgaatcattg

SEQ ID NO: 3739 - DNA, 5143 bp, Unknown
  gut microbiota DNA sequence
gcaaagatggttgccagtacataccatttgaatgaatctgtagtatctcctgccttcggttgcttcagccagtctggaacacccaatccataggatccactgcttccattcgtactttcataatgtgcatagatccgcccgataccaacccttttatcaatcttttcattatatagcgttgtttccccagcaatggttccgtcatatgaaacaaggaactgccatggtgcttcggaccgctcatatccgtttgccggttcgatctccacgatacggtaagttcctgccttaccggccggaaccttgcacgctcctgcttcatccgttctgccatgaaataccacctggccggccggatcagtcacctgaagcagtgtatccggaactgctgtgccgtcttctgaatctttcttttcaagtatcacctccacatttggataatcatacaaggtccggttttctggatttgttactttaccatccttaatataaaggtactgtacagccgggttcaggtaatatccagccggtgcctctgtttcctgatatgtataggttccatccgccggcatagcaaatgtcagatatccgctctcatccgtaataccttttaaatacaggcttccgtccgcactgtaaacagtaagctttgctccggccacgccgatctggtttactggatcgtacttgcgaatggacaactggcgtttccccggagtggtgccacctccgccaccaccgccattgatcgcaaaattcacaaatcggatttcttttgtttcctgacccaatggcataataaactcctgatcctcagatacccggtatccaccaggagctgatacttcgtgtatgacataggtctctccggctttcagtacaccgtcaacccggtaaaccgtaccatccggcacgaaatcaaccagtacatttccgtccagatctttgatctgtatctggccaccactaagaagcgtgccatttggatttaccttgccaaattctacatgggttacatcatcaaacatttccaccatatcgacgctgccgtctttggataccgtaaattcaatgctctccgcaaccgaatagccatctgccggccggatctcaataagtgtataagtttctccggcaatcagttttgctacgatttcgtgtggtatcgttgaagaggtccattcatcaaccacatttccattcttatcctttatcaccagatgacagcccggaagttcttcttttcccgtaattttcttcttggatacaaccacatgcgtcggcttatcctccattttgacctgatcgaccgttccgtcatggcttactttaaacggaatatcttccgcataggcccaaccgtctgccggacgaacctcccgcagtgtatattcctcgtctgcgatcagtttctccttgatttcatgaggctggtcggtagaaaaccactcatctaccacatttccattcttatcaatgacctgcagcgtacagcccagaagttctttacttcccgtaatctcctgcttggaaattacaacatgagtcggcttgtcctccatcttgacataatcaactgttccgtcatgactcaccttaaacggcacatcttcggcatatgcccagccgtctgcaggccgaacctctcgcagcacataactctcgtccactaccagttttgcaacaatttcatgaggcttgtccgtagagatccactcctctactacgtttccgtccttatccacaacctgaagcagcgctcccgggagttcctcactgtttgtgatcttctttttagataacacgatgtgagtaggcttatccaccataaccacacggtccactgtgccgtcctcatttacggtaaaggtgatatcttccgcataggaatatccaggttccgggcttttttcaaccagtctataggtctttcccggttccaggaattcttcaaggctttccgctacatcagaactggtccatctgtggatcaaattattttcctcatcgtataattccatttcacagccaggaagctctttaccaccgccaatttccgtctttgagatcataactttggttttccggtccgcggctgcaatgccttcaacattcacagactggcccagaattgtactgatcttatttgtcggaaggctgtccccatttgcgaatacggtttcttccgtaagcacataggtttctccctgcttaaatatcgtgcgttttgccgtatcctcaatatttctggtaaatctggctccgtttccgtgagttacatccacacttccggatgtcattttctccgtatggtgcaggccattctcgatcttttcaatctcataggtcacatttttatagtaaccaggatcgatcttgacatattcattaccagagaggctgatggtatcgccactctttatcatgccggtcctgctgccgctgtatgaataggtccctggaagttcccttcctgtcgatgcgtcataaagttttaccctaaatgatgttttctgatctttataccgctcctttccagatcccgtaagttcgttgaacaatactacttttccataggttaataccggcactgtcttctgggtttcccttacaattccgttatattctgctttcgcctcaatcgtagatgcctcaccacttacctgtgttgtaaaagcagcgtatgcagcttcacccggcgccacgctctcaaaatggaataccagtttttctccgtcgaaagttcctgttcccggatcaataatgcttgtatctgcatcgacagtcacggttaataccatatctgccgttttgtgatccgtattgatcattcgaattctttcaaaaattgcctgatccggcgctaatgcactggcaccatccgcagacagtctggttattaccagatcatctttctgcagaggatttttcacctgcttttcctgattatccgcatctggaataaacgcggtaatcttggttccgtccgcataagataaggtctcatttacatggtcaatttctctggttggaattttaatctctccattttcatcaaaccagaatgttttggtgaaccgatccgtcacaagaaccgttccatcggaatacctgcagtactccgtgatggtataggccgatccttctgacacagaagcgaacggttttcttatcacatgttcctcgccagcaccgatccagctttctatcagatctttgtttgcgtccgtcagctcataatatatctgggtcacataacggcccttcagttttacctgctcaatgcttgtggtatcacgattgatcgtatccaattcataatcattctttgatacccgctggatttcaatactctccatctggttagaaaggccctggatactccttccatcactggataccgtaaacagtaccggcttcatcagattccaccccttcggcgcagtatcttccaccaggatataggtatgccctgcgataagtccgataaccttatgcctcttctccaattttctggtggtccaggtcgtaaacggtgcatctttatcatatacaggctgatcgtgttcatcttttcctgtcacttcataaatggaaagaattgccccatctataaaagcaccttctgtattgtcatcccctaaaacatcgaagtcctgcttactaaaatacagcctggttttctgatcctttacgctctcctgatgaattactaccgtctcatgggcaaagctctggccgtcaccctgtttcggctcaaactgccaggtgatgatttccggatttacactataaccctccggcgctgcgatctcctgtaacgtgtatgtatatggaatgatgcttccatctggccgcatctcaccaacaggaagatcctgcacggtgatgactggctctgttccatagatcatgtttgtggtgaccggctcatccagatcattttctttatacgctttgatctcaaatgttgctccggcaagtccctggccgtcttctccagtcttggtgatagaaagcgcacctttcaccgcttcattgactgcccgaatcgtctgtaccaaatcatccagatgatactcaaatcgtgccggctctgctaaggtataatagtccggtgctgacagttccactaaataatagatgccttctgccaggcccgtctcgatgtgaatccttaaatctcccacctgatatccttccgggatcctgccatttactttatctgtcactgtataaatgccatctgctccggttacccactggctgaccagatactcatcggactggttcaaatttcctgactgatctgctctatacagggccatggtagccccagccatctccccggtcacaccaacagcagatttagaaagccagatctgtccctccagatcctcgatgtgatactgctggatctccttccggttctccactacaatcacctgggcatctgcttttaaaaatccatcgggtgccttggtttctacaaggacatacttttcccctgctggcaggccattgatccttctggtgcctctgtccgtaaggtaagtatccgcgtaagcatttatatgctccaatttctgataatcaaactggtaatcaaagacggtttccggcaggttgccagatactgctacgcgtatagtctccccgtcgcttgtaatcatggtaaggagtgctttcgttgcaaatcggtcgcgacttcctccggcgcttgtcgcatccattaccgtcttagctgtgacggttgcagatttttcctgcccattctccttccagccaaatagtgaaagatccacaccataggacgcatacgctttttcaaatgcatcgcggaaattctgataatcctcaacagtgccgctcttaaatgaggccagaacacgggcatcatataccggcgtgccatccgcatcgtaaataatttccccttctgcattgaccactgcctgatgaaggctaaattccgccccagacagctggactttctctccgtgctcatctgtaaagaatttttcaatctcaacctttgtggtatcatttttcatgcagacggtttcaacttctgactgatctccaactgtaatttccaccggatctgctgttacaaatccttccggcgtttcaatctcttcca

SEQ ID NO: 3740 - DNA, 213 bp, Unknown
  gut microbiota DNA sequence
cttcccaaaccagcggagtattctgcgtttttaccagataatatcccttcggatatttctccgtatccgcactatatacccgtctggccggatacagcgccagttttgctccagaaacagaactgtatgtataggaagcaatatcaccagtcaccacctcgcgctcatacggtttctctcccgtttccggatgttcatggtccatatccagaa

SEQ ID NO: 3741 - DNA, 197 bp, Unknown
  gut microbiota DNA sequence
gcatgattggtgtacttactgttctcttttttactggcgaaagttggctgggtggcggctggtattacatacctgacagggcaatcaccatcgcgcttattttctgcatattctggcagattgctttgataacagggacatttttcttatcaatgcgggtaaataaaatcttctgtgggtggaggaaaagaattgtt

SEQ ID NO: 3742 - DNA, 227 bp, Unknown
  gut microbiota DNA sequence
atcaaaacggttgaaaagggagttcgttacgcacaggaaatggtagcagaggctggacttttaagaagggaagaattccctatctccgagctgattttaggaacgaactgtggaggcagtgacccatcctccggactaggttcaaatccgcttgttggtgagttgagcgatcgctttgtggaaatgggcgcaacatcggtgctttgtgaaacgacagaatttctggg

SEQ ID NO: 3743 - DNA, 234 bp, Unknown
  gut microbiota DNA sequence
gctttcactgacttttaaaatatcttccggctcatcgtcaaaaagatccgtacatacagcatagaggccatcgtactgtgcttcctgtgcaatcttttcttcatccagaaaatataggatatcggccatttctccgtcttttgtaacagctgttttatcaataaatcttgctgggtcattcggatttttccggtttttcttatgcctgccatttgaaagcattgcttttgctcg

SEQ ID NO: 3744 - DNA, 197 bp, Unknown
  gut microbiota DNA sequence
caggatctggaaccctatcttacgcctgtccccggtcggaatatccatcttttatccgccaaacaggtgaaaggagcataccatctgcctctcaatcgaatcatacagctcatttcttctttgaagacttattttgacctgattcttatcgataccgatatggcatccacggatgcttccgcaaaacttatggaaat

SEQ ID NO: 3745 - DNA, 197 bp, Unknown
  gut microbiota DNA sequence
cccattttggataattgtatgaaagatatgccttcaatgaaaaattatctttttcaacggcaactgtattctctttattttcatcaaaagaatcctttaccgtaattgctgccatattgagagtcaatagcgtatccgacaaagcaactccttttgtttctgcaaagtatggattctggtttgtatgaaaaatcagg

SEQ ID NO: 3746 - DNA, 225 bp, Unknown
  gut microbiota DNA sequence
gggaagaaaactgccatgatttttgaacgtgaggctgacagcatttcccttggctatacgattaataaaaaaagcctgaacaccagcattaaccctaagatgccgtatctttctttcctgtccattaactatgacattccggtcatcagcgaggttattacatggtttgaaagctgcattatccgcagctatgcaaatcccgtagtggaacatcagattctgtta

SEQ ID NO: 3747 - DNA, 210 bp, Unknown
  gut microbiota DNA sequence
attgactgagcggcggacgggtgagtaacgcgtggataacctgcctcacacagggggataacagttagaaatgactgctaataccgcataagcgcacggtaccgcatggtacagtgtgaaaaactccggtggtgtgagatggatccgcgtctgattaggtagttggtgaggtaacggcccaccaagccgacgatcagtagccgacctgag

SEQ ID NO: 3748 - DNA, 31061 bp, Unknown
  gut microbiota DNA sequence
caagttctgactgagcgaagttaggacttgcccgattttttttgcaaacacaaaaaaggccgtctcattttgagacagcctctttcctgtcttttctattttattttaggctttaattcatccggtgagtctttcgtatatagcatcggtgaacctgctacctttgtaaataattcttgaacctgttgaatttccactttttgttcaggatggaaattttccgaattcatgtaatcaagtattgatttctttaattgccgggctactattcgtttttccggtgcactatccaaatccaatgtggtcataatcagtttgccatttaatacattggcttcgaacaacaccccgattttacgactgataaaccacgtgtcaatgctttggacaagtggctggaagtctttcccgaaatcggtgaattgcatgactggtgcacgattcaataattcccaccattgcaggttgctatgatattcggtcggaaacttccggaaaagaggatggtgaggattaagcaggatgccggtcgtatgaggtgggcgcatcttgaaccaggaagtgttccagaataccggggtaaagtactgtacgacttcttttccgtatgtcactttctttcctgctttgataagtacctttcctcctttttccagtatttctcgtgctttgttgtctagcgtgtctgtctgatatattgtttcttcagaggtgaaatcgacggtttcaggatacacccagaaatcccagtcattaacggcatctgttccttccactcgtacctctatgttgagtttcatagccgatggaatatctttcaacggaaaatcaacctgtccgatatggttcaggttaccaattggaatatccgtctgaccgatgacaccgtgtgaatagacttttccgtatgcatcggttatacggtagcttactttagctgcctgaagagattctgcgtcgaaatgagaaatttctatatcagcatgaaacgtttcgttagtggtgtatacgaacttttctgtgcgcatgagtggtacggtcggtgcacagaaccgatgccactcatcggcatttatgtaacctttttcttcaaagaacacatctagtatacctactaatgccgtgccttgtccggagtagtcatttaaagccagcaactgaaatcctgcatagtctggggtacgcaaggtacgttcgatttcatgtttatagcatagtgcctgtaattttccggaagccatcataaaatcttgccctttgccttccatgccgtgcgtgtgcagaaggtgctggaagatttcgaaattgcctgctttgttgactccggtgtatttcttgatttcattgaagttcggaaatacgcaccattgtccggtttcgtgtgatacaaacggttgtttaaccgtatcaagatattcccggaaatcagtcatcgtttccggacgttggcttttccagttcaatcctctgactcctgcttttacatggtactgacttttaggttgccatgcccatcctccacctacagaggcaccggtatatacccggcgtgagtccttggctttccaataatccacaaagcgagaaacccatggaacccagttcccggaaggctcgtttccgcaagccagcatacagaaagaggcgtagttcccgtatctttgcgtcatgcggatagtttcttccaacaggtattggtcaatgtattgtccttgtcccagacggacgtcatggtttggccagcttggtccttctggttgcagataaaatcctacgcggtcggccgctttaaaggcagcttccggtgggcaataagagtgaaaccgcatgtggttgagaccgtagttccggcagatacggaatacgcgctcccagctttctacatccattggggggtagccggtcagtgggaagtcacaattctctacagtgcctcgcaacatggtctttcttccatttacataaaaccagcgcccttggattgtgaatgtacgcatgccaaattctatttcgcgtgtgtcactttgattcgcttgtgtaagcgtggctgtcaacttatagagtgtcggatggaattcgtcccataattgtacatcttttcccatgggcagcaccatctcaagggtatcttttaaatcgtttttagagaaggtttgtgtgatttccggtacacgatgaggaatgtcactattaaaactttcagccttcaaggaaagttctacaggatgcttactcccctgtatgaccatacgtacacgggcctgttgtttgtcgggctccggaaatacctgaatgtctttaaaggatatttcaggaagaacatagagatacatgcggcctaccacaccgttccagtttccttgcgtgtggtctgtgatgctatgggagttttggcctactttggcacaactgtcgtggttgtcgatacgtagagtaagtgttgatgttccgggacgaacggctgtagtgatgtcatattcatgaggagtactcaggctgttttgtgaacctatacgctggttgtttatccagactgttgtttcaatatgtggacgttctagaaacagcatcacgcgtttgcctttccaggatgaaggtatgtgtatttctcgtttataccaggcagctcctacataacgtcgttcaggggtaaggaaaaaaggaaactttatatttcctgtacgtcggaacatttccagtttgggattataatagaaagaactgtcgtaaagcgatcctgtccattgagtttgcaatgaaggacgctctcctttcagtttttccggcatagaaccgggcaggttgattttgtcgttaagaggacgggcgtaccatttttcgtcaatccctttattttctttgtcaatttgaaaattccactctcctgtcaaatcaatgacattctgcgcatgaagcaattgggtgataagcaggagataaaaaacaaaaatgtgttttctcataaataccagtaactataaaaaattatcgaggcaaatgtaagatttgatacccacatatccctcgataattcttcaaatagctggaattttgtgtatttatactttaatcagtttgtatttaggcacaagcgctttcattacacaccatgctatgaggtaggctacggcacagatacagaaaatgatgaagtaaccggcttcttttccttcgaaaccaaagaacaccatttggctttctgctgcatagtcgaacaggattcctgagcacatgttgataaggaatgctcctacaccacctgccatacctccaataccgataatggtggctactgcactcttagggaacatatcacttcctacagaatagatattagctgaccatgattggtgggcagctcctgcgataccgatgatgataatcgggaaccaataagaaatgttacccaatggctgtgcaaagagtgtgaataacgggaatacggcaaaaatcaacatagcctgcatgcgggctgcgtatggattctttcctgttttgttgataatgatagtaggtaatttgcctccgtaaatggaaagcatggtaatggcatacaatacgaatatcagcaactgggctgtcgcgctgtctgaagagaatccatatacgtcggagatataggcgggggtccagaaaaggaagaaccaccatactccgtctgtcaggaattttccaaagataatggcccaggtctgacggaacttgaagcattgccagagggagattttaggctcgtcttccgtgtgaacgtctgcttcttctttttctttatcctgttggatgtaggcaagctcagctgcattgacttgcggattttcctggggctttttatacatgaacatccaaagtcccatccagataaatcccagcgcgccaattacgatgaaagccatttcccatccgttacccacaccgatacttttgaaatagctggcaagtggaggaatactcactggggctatgagggcaccgatggtagatccggcattaaagatagatgtcgcaaaggcacggtcttttttagggaaatattcagcggtgactttaatagctgcagggaagttacccgattcacctacggccagcacaatacgtgccgcaatgaagtagtacacgctggtaatggcaatggtagaagtaagggctcctgaggctgcaatcatttcattgacatccttaagtccgagactcatttcggtagcccatccgcaaagtgcgtgtaagcaggcacctagcgaccagatggcaatagcccagagataccctttcttgcttcccagccagtccacaaagcgtccggcaaaaaggttggcaatcgcataaataattgagaaaatggcagtaatagttccgtagtgcgtatctgtccagtggaattctggtgcgataaaatctttccacgtcagtgacagtacttggcggtccaggtaattgaccgctgtagcgaaaaagagcatggagcaaataatccatcggtaattgctcattgtttcgcttgatgttttggttgtactcatatatgatattagattagtttgttttggcacaaagataattttcttacaagcgaaaagcctgtaaatattggcaaaaaacctgcattaattggtcaggtgtgtttttacaaccacaatgaaatgacaaattccacatacttggcagattcttaatttaagagttctgtgtaagtctgtggaatttgtgtattaggatacctctaggtaggaggtatgtatgttatttcatttcagtgtatttaatcttgtccatatctccgtagtccaggttttcacctgccataccccagatgaacatgtagttgctagttccagctgcagcgtggatagaccattccggtgacatgatagcctgttcgttggcaagccataccaagcgttcttcctgcggttctcccatcaggtggcaaatcatgttgccttcaggaacgttgaaatagaaataagcttcgatacgacggctgtgagtgtgagcaggcatggtgttccacacgcttcccggtttcagctctgtcagacccatctgcaactggcaaggaccttcctgcagtacgttctttacaatcagctggttgatgacacggtcgttactttcttccatctttccggcagccattgagttagctttcaaagagcccttgcgtccatcgatggtaatccactgagtcttgtattccttgtgtgcaatggcagagttgatgtagaacttagccggtttgctggcatccttgctcttgaaagttactttctggttgccacgtcctacgtagagggcttctttgaatttcaactcatattccttgccatctacagttacgataccgtcgccaccgatgttgataacacccagctcacggttgaacaagaaataaggagctttcagcggatcgatagtatccagtgacagctctttgtttactggcatggcaccaccgaagatgaaacggtcgtacatagagtaagttacgttgatttcatcggctaccagtactttctccatcatgaagctgctgcgcagtctctgtgtgtcgtatgtttttacgtcttgtggattgcaggcagtctgcatccggtagttaacttgagcattagcagaaagagctgctacgcccagcatcatagccatagctaattttttcataagcgtttgtttatttattggtttttattcttcaatgtgttttgcttctttgataatgcggcgacggttgtagatagccattgccagtgccacgataaccagtatgcttgaacctacaatcttgaagttgtatactgcgtggaatatcagccaagagaagatgctggaagcaaagtcaagtgcacctccctggaatccttgcggaatctgtacagccgggtcgtttgttctgacaaatacatcctgagcagcttgtgtaaagaatggagccaggtcagttacaaaatacaggcctacaatcagcgatacaagaccaatcaggaatgttttcagcacattaccttttgtgataggtaatacggctgggaacaagtagaacataccagccagtgaagccaatggcaagaactggttgttgggtaatactactgacaggaacagagctacgggaataagcagcaaagaaactaccagtgtagtcgggtgaccgattaccagtgccggactcataccaatgttgaggcttgcactgtttttaaacttgcgggcaatcagttcgcgagttgcatcagaaatcggacgcaaaccttcgataaataaagaagtgatacgcgggataagttccattacagctcccatcttgatacccagtcccaggatagccggaattccgtcaaccagctcctggctgtttttgcaggccagagcaccgataccacaacctactactactccgaggaatagcggttcacccatgataccgaattttcttttcataccctctgcatcgatgttcagcttgtcaaatcccggaatcatatccaatgctttgttgatgacaagggcaaagggtacaaatccttggcagaaaggctgcggaatagagataccgtccattttttcgtaatatgactggaactgcttgcaagtcaaatcagccataatcagggtaatgatgtagcagataattgctgagaagaatccccaccagatattttcagtggcgaaataaactactgcgccaatgaaggcaaaatgccagtagttccacaagtcgatattgacagttttagttgttttcgttaatagcatgatgatgttcactcccaaacatacaggaatgatgaatgcacctacagaagtgttgtaggctacagaggctgcagcaggccaccccatgtcaaagatacccagttccagtccgtagatttccgttacctttttcaacggttctcccaaactgctggtcaaaagagctgttacaacagaaagtccgacgaatccgactccgaccagcaaaccgcttttcagcgccttgccgaaattaattccaatacatactcccagaatggtaaacagaataggcatcatcacggctgccccgagcccgatgatatagctaaatacttgttccatgtcttttcttttgtcctttaaaaatgtggatttaggttaaaaataaatgatttcgacccaaaagtacagccttttattctaatttccaattgcaaatccgttattttcgaaactttgctgatttaataacatttttttcgtttacgcacacgggcggactttctctaagaaaccttgtttgatttgtttcaatttgaagagggaggaatttctgtaaggaataaaaaagaaagttgaaatgtgaaaaaataaaagaaaaatgccaaaggagattttttctgaggtcaggataatttttatgtttctctgccttgaaacatacgtttcccgaagcggagccttacgtttccgataaggaaaacatagggattcgcttcgagaaacgtagaaaataacaaaaagtttacttgtaaatggagtaacgtgtgtcgttttttctttagtcgtttgccgtttcctgaataaagattttaccgtttttcttttccactgcaatctggctaccttccggattcaggttgaaaggagtgatttcatcggtgtgattatctaccaccatcagcgtactttcttctgcgaaacgtttcacttgaaatttgatggcagtatttccgatgcttgaattaaatagcagactgtcattgatatataccgaaagactgtctccggtaaaggagtcagctatttctaccgtataaattccggcaaatgttttttccttgtcgttgcttttagactgattacgaaaacctaaatataaaaaaaggcatacgataaagaatactccgaaagcgagtatcccgtttcctatcatgaattgtttgttgctgttgatacttttgttgttcataattaaggtagttataatgtatattcccttgcaaagtaagttattttcagtttgtttatcgtgtatgttataattttttttctacatttgtcacggaattatataaaaacggaatacagaatatcatgcaaaataacctggtcatagtggagtctccggcaaaagctaagactattgaaaagtttttgggggagggttataaagtattgtcaagttatggtcatatccgtgacttgaagcaaaaagcgttcagtattgatataaagtcgcatttcaagccgatttacgaaataccggaagataagaaaaaactggtggcagagttgaaggaagaagctgccaaggccgacatggtatggctcgcatccgatgaggaccgcgaaggagaagccatttcctggcacttgtttgaggtattaaaactggaccccgaaaagacacgaaggattgtattccacgaaattacgaagacggctatattgaaggctatagagcatccgcgtcatatcaacattgatttggtcaacgcccagcaggctcgtcgtgtactcgatcgcattgtgggatttgaactttcaccggtgctctggcgtaaaatcaagccggctctttcagccggacgtgtacagtcggtagccgtacgcctgattgtagagcgtgagcgcgaaattaatgcttttacctgtgaagcttcttataaggtagtagctacctttaaggatgcagaaggggctgtaattcgtgcaactcttggccgacgattcaaaaccaaagaagaagcacagcgttttcttgaaaaatgcaagaatgctaccttcgaaatcaaagatattactacacgaccggttaaaaaatcaccggcacctccttttactacttctacacttcagcaggaagcagcccgtaagcttggttttaccgtggcacagacgatgatgcttgcacagcgtctgtatgaaagcgggttgattacctacatgcgtaccgactcggtaaacctttctgaactggccttgtcttcaagccgggatgccattctttctttgatgggagaacgttatgtacatacacgtcagtatgcgacaaagacaaaaggggctcaggaagcacacgaggccattcgtccgacatacatgtcaaatgaatccatcgaaggaagttcacaggaagtacgcctgtatgaattgatatggaaacgtacgctggcttcacagatggctgatgcagagctggagaagacgacagctaccatttcggtgagtggctgtgaggatgaatttcaggctgtaggtgaagtggtcacattcgatggtttcttgaaagtctacaaagaatcatttgatgaagaagtagaacaggaagatgctgccggacttcctaaaatggaggtaggagaggttctgcagcgggaagaaattgctgcagtgcaacgtttcagtcaggctccggcacgttatacagaagcaagcctggtgcgtaagctggaagaattaggcatcggtcgtccgtctacatacgctcctactatttccacaatccagcaaagaggatatgtagaaaagggaaacaaggaaggagtgaagcgtgaatactcattgctgaaactgacgggaaaagaaattaaggaaacggtgcagacggaaatgagtggaagtgagaaatccaaattgattcctaccgatgtaggttgtgtagtcaatgacttcctgatgcagtatttcccgaaaattatggactataactttacggccagtgtagaaaaggaattcgacgaagtggccgaaggggagaagaaatggaccgatttgatggaagtgttctatgagaatttccatccgctcgtggaaactacactggcgacgaagacagagcataaagtgggcgagcgtatgttaggtactgacccgaaaagcggtaaacctgtttcggtgaaaatcggacgttttggccctgtggtacagattggttcttcggacgatgaagaaaaaccaagattcgcccagctgaacaaggaacactctttggaaacaattacactggaagaagcgcttgatttatttaaattgccgcgtgtattgggcgaacttgacggaacaaccgtttcggtaggagtcggacgttttggtccgtatgtgcgccacggaaatgaatatgtgtctattccgaaggaaatggatccgatggctgtgacttttgaagaagccgtacggatgttgtctgaaaagaaagaaaaagaggcacagaaaatcattaagcagttccccgaaaatccggatatgcagattttgaatggtcgttacggaccttacattgcttaccagaagaaaaattataagattcctgaaaacgtgaatccggcagacctgaacctggatgcttgcttcaaggtaatagaactgcaggcacagaaagccgagatgcgcaaggcgaaaggagcaaaggcgaagacaaagaaatgaaaagagttttcctgattggctatatgggttcgggaaaaaccacactgggcaaggcttacagtgcggctaccgggctacagtttgtcgacctcgactggtacatcgaggaacgcatgcataaatccatttccgacttgtttgcggaaaggggagaagacggtttccgcttgctggagcagaagatgctgcacgaggcgggagaatttgaaaatgtattgattgcatgcggaggaggcactccttgctttttcgataacatggactatatgaatcatacaggcgaaacagtatttctggatgtatgtccggaagtactgttccgtcgtttaaagatagcaaaggccaaacgtccgctgttggcgaataaaacggatgaagagctgatgcaggttattacttctgctttggaaaaaagacttccttattattctaaggccaaatggcgtttcaacgcagaagaacttgaaagttatgcacagattgacagagcggtaagccgcttgaatgaattgataaattaaagaagtataaatctagactttatgtagtgaaatgagaaaatggcgtattgaagactctgaagagctctacaacatcacggggtggggcgtttcatactttagtatcaatgacaaaggtcatgtggtagtaactccacgaaaagacggagtagccgtcgatttgaaggaactggtggacgagttgcagttgagggacgtaaccgctcctatgctggtacgttttccggatattctggacaaccggattgagaaaatctccaattgctttacacaggcttctgaagaatatggctatcaggctcaaaacttcattatttacccgattaaggtaaatcagatgagaccggtagtggaggaaattatcagtcatggaaagaaatttaatttagggctggaggccggttcaaagccggaacttcatgctgtaattgccattaatacggattctgattcactgattatctgcaacggctataaggatgaaagctacattgaactggctttgctggcacagaaaatgggtaaacgtattttcctggtggtagaaaagttgaacgagcttcgactgattgccaagatggccaagcagctgaatgtacgtccgaatattggtatccgcatcaaattagcttcttccggtagcggaaagtgggaagaaagcggaggcgatgccagcaagttcggattgacttccagtgagttgctcgaggcacttgatttcctggaaaagaaagaaatgcaagattgcctgaagctgattcatttccacataggtagtcaggtgacaaagatacgtcgcatcaagactgcattgcgtgaggcttctcagttctatgtgcagttgcatcagttgggcttcccggtagaattcgtagatataggtggaggactgggagtggattacgacggtacccgctctgctaacagtgaaagtagcgtgaactattctattcaggaatatgtgaacgactctatatccatcatggtggatgccagcaacaaaaacaatattcctcatccgaacattattacagaaagtggccgttcactgactgcccatcattcggtattgatatttgaggtgctggaaacagcttcactgccttctatggacgaagactttgaggtgagtgcagacgatcatgaactcgtgcaggaactttatcagatttgggataacctgaatcagagccgtatgctggaggcatggcatgatgctcagcagattcgtgaagaatcgctggacttgttcagccacggtattgtcgatttgaagactcgtgcacagattgaacgtatgtactggtcggttacacgtgagattaaccagattgcatcgggcttgaaacacgcaccggatgaattccgcaatttggacaagctgttggctgacaaatatttctgtaacttctctctattccagtctttgccggattcctgggcgattgaccagattttccccatcatgccgattcagcgtctggatgaacgtcctgaccgcacggctaccttgcaggatattacttgcgactcggatggaaaaattgccaacttcgtgaccagccgtaacgtggcacacgacttgcctgtacataccatcaaggcaaaggaatcgtattatatcggtgtgttcctggtgggagcttatcaggaaatcctgggagatatgcacaacttgttcggcgataccaatgccgtacatgtcagtgtggatgagaaaggttacagcattgaccaggtgattgatggagaaactgtggccgaagtactcgactacgtgcagtatagcccgaagaagctggtacgtacgctggaaacttgggtgacgaagtctgtgaaagaaggacgtatctcgctggaggaaggaaaggaattcctggcaaattatcgttccggattgtatggatatacttatctggagtaatttaagaaagtagcattatgaaagaaaaactgaccgttataaaagtaggaggaaaaatcgtagaggaacctgatacattgaatcagttgctcgatgatttttcatctctgtctggctataaggtgctggtgcatggaggaggccgctctgccactcgtattgcttcacagttgggaattgaaagccagatggtaaatggacgtcgtattaccgatgcagaaaccttgaaggtggtgacaatggtttacggcggacttgtcaacaagaatattgtggccggtttgcaggcaaaaggggtgaatgccgtaggtttgacaggagcagatatgaatgtaattcgttcggtgaaacgtccggtgaaagacatcgattacggttacgtaggagatgtagagaaagtagacggaaaggccctggctgacctgattcatcgtcagattgtaccagtgatggcaccattgacgcatgacgggaatggaaatctgctgaatacgaatgccgataccattgccggagaaaccgcaaaagctttggccgagtattttgatgtgacattggtgtactgctttgaaaagaaaggggtgctacgcgatgaaaacgatgatgacagtgtaattccggtgctgactcccgatttatttaaacagtatgtggaggaaggaatcgtgcaaggtggtatgattcctaaactggaaaattctttttcagccttggatgccggtgtgtcgcaggtcgtaataaccttagcatcagcaattcacaaagattccggaacaattatcagaaaataattcaaaaaaaattggcgggtgggtgtaacttttatgaaactcacccgtcattagtatagagagccatgcaagagatcagttttcgtgacaatattctgccgctgaaagataagcttttcaggttggccttgcgcattacgttcgaccgggcagaggcggaagatattgttcaggatgcactgattaaggtgtggaacaagcgtgacgagtggggagagttggaatccatagaagcctattgtctgacggtagttcggaatttagctattgaccgaagtcagaaaaaagaggcccagaatctgaccttgacaccggaaacgcaggaaatgccggatgcacagactcccgaaagccagtttgaacggaatgaacagtttcagttggtacacaggctggtgaatgaactcccggaaaagcaacgaacgattgttcagcttagggatattgaaggtaagagttataaagaaattgctgatgtgttggggatcacggaagagcaggtgaaagtaaaccttttcagggcccgacaacgcatcaaattaaaatacagtgagattaacgattatggactataagtacattgaacaacttctggaacgctattggaactgtgaaacctcggtagaggaagagcagattcttcggattttctttcagcagaaagaacttcctgcccatttgcgccgctaccgttctttgtttacttaccaggaagaagctgccgggatgaagctgggtgatgattttgacaagcgtgtgcttgcggaaattgaacgtccggtagtaaaggccagaaagctgacgctttattcacgttttatgcctctgtttaaggctgcggctatgatgttgttgctttttacattaggaggagtagtgaaacatgcgacagaagagggaggcgcttcaggtattgtatatgtgcatgatcagtttgaaaaccgtcaggagactccgcaggttgcctacgaaggtgattcggtgaagacgctgattcgggaaacatcttccaaacccagactggaagaaaacagtaacagatagaacattttcatttgcttttatataaatagttagtgcttattaaaacttaaaacaacaacgaggctgtgaagtttcaattctctcaaaattaaattactaactaaataaaaaaggattaccgcgtgagcagtagtccttttttatttggaatatttcactatttttgccgcaaaatttggataagaacacatgtttatagtcattggagttatgttgggggggatgttgataggctttctccttcgccgtcaggagttttcgtggattggtaaagtcattaccttgttaatttgggcattgttgtttttgctgggaatagaagtaggaggtaatcgccggattgtagagggacttgccactttgggggtagaggcttttgtgattacattagcttgtgtgttgggcagctgtattttagcttggggattatggtatttgctgtataaaaagaaaggagaaaaggcatgaaaggaagtttgattattatcggcttttttattttgggcacattgtgtggcttttttcatctgattccttttgatataagtaaaagcaatatcagtttttatgccttgtgtgccctgatgttcagtgtaggattgagtgtggggcatgacccgcagaccttgaagaattttcgttcgctgaatccacgcttgatatttcttccggtagctactatattggggactgtttctgctgcagctttggtaagcttgattcttccgcatcgtagtgctcctgattgtatggctgtaggagcagggttcggatattattccctttccagtatttttattacgcagtataaggggccggaactgggtaccattgctttgctttccaacattatgcgtgaaattattactttgctttgtgctcctctgttggtgcgctggtttggtaatctggctcctatatcggctggaggagcgactactatggatactacgttgcccatcattacccgttgctcaggacagcaatttgtggtagtttccatattccatggttttgtgacggatttcagtgtgccgttcttggtcactttcttttgttctatttgatgagtcgtttttttaagaataaaatacggccctcgacgaagaaattaaccatcttacgtcgagggccgtattgttatgaacgagatagaagattaatcttggtagtagactctctttacacggtttgatacgctggtcaggatttcatacggaattgtttccagtatatcggagagtactgttaccgggagatcatcgccgaagataatggctttgtcaccttccttacaatcaatatccgttacatcaatcatacatacatccatacagatatttcctacgtagggggctttctgtccgttcacctgacagtaagcatgtccgttacccagatggcgatttaatccgtcggcatatccgatggggatggccgcaatgcgtgaatcccgtgtcagtacacctttacggctgtagcctacagtttcatttgctggtacctcgtggatttgcaggatggttgttttcagggtagtgacattgtgcagcatcttgttggtaaacggatctatcccatataatccgattcccaggcggaccatgtcgaattgtgcacccggatagcgctcaatacctgccgtattacagatatgacgaataatcttgtgcttgaaaccttcctgaagcgtggtcgaggcagcttcgaacgtttctatctgatggcgtgtgaaggcatcaaaacgttctgcatcactgcctaccaagtgagagaatacagaacgggggatgactgcgctctgtttctgcaggcgctgtacgagttgcgggatttcgcttggagcaaatcctaaccggtgcatacctgtatcaatcttgatatgaatcgggaaattgctgactccttcacgttccgcggctttgataagttcttccagtaggtggaaactgtatacttccggttccaggcgataatcaaacattgttttgaaagccgtgatttccgggttcatgatgatgatggaactgttaatacctgctttacgcaagtctgctccttcatcggccacagctactgccaaataatctactcgctggtcttccagtgtcttggcaatttcaaatgagccggccccataagctgaggcttttaccatacaaacgattttagtctccggtttcagtttgttacggtagtagttcaggttgtctaccagtgcattcaggttgatttccaagatggtttcgtgtaccttcagttccaacgcatccgtaatgtcatcgaagtggaatacacgtgccccttttatcagaatatcttcgttatgcagctggttcagcaaaccggaattcaaaagttcggaagtgttggtaaagaagtctttctgtatttcaaaccggttggctgcagcagaaatttcttcgcctactccgataatatggtctactttccggctatgaaccaggtcggctacttgtctgtataatagtttgcttgtttgtccgctttccagcatgtccgacaggatgagtgtacgcttccggttcttgtcttccgagcgtctcatcataaaatcgagtgcgatatcgagcgaggcaaagtctgaattataactgtcattaattaatgtacaaccgtttttaccctcttttacctccagacgcatggctatgggttccagatgaagcatgcgttcagcaattgtttcagggggtaccatgaggtaaagtgctacggccagacagttgagtgagttttcaatggacgcatcgtcaatgaatgggatacggtattccttgaagaatcctaagtagcggtatttgatggtggttcccgtatcgtctttcaggattttctcaatgaaaagcgggcgttcggaatctttggtcgaccaggcaatttcacgggctgtgaacagtgatttggtcacacagctggtgataagttcgttgtcaccgttgtacacaatcacgtcgcagtccttgaacaactgcagtttctccatacacttgtcttgtacggaagagaagttttcttgatgtgctcctccgatgttggttagaataccgatggtgggttggataatagggcgtaatgcttccatctcacccatttcggaaataccggcttcaaaaattcctaattccgtgtgttcattcatcagccatacggaaagaggcactccaatttgtgagttatagcttcttggagaacgggtgatggtacggtccggacttagtatctggtataaccattcttttaccacagtctttccattacttcccgtgataccaatgaccggcacctgaaattgttctctgtgtctggatgccagacgttgtaagcttttcagcgggttgggtacaatcaggaaattagcatctgtatatgatgaggctgcttccggtatttcgttgacaacgaaattacgtacccctttctggtaaagatccgggatatatttatgtccgtcattgcgttttgtctttaaggcaaagaacagtgtctcttccggaaaacacaatgaccggctgtcagttagaatccagtcgattgtagaggaagtagttcctatgcgttgagctcctaaaatggaggttatttcttcaattgtgcttgacataactttatttccttttgaacatctaagtacggtaatttttcttttaagtcctctatctttaacagtatttgacttaaaaaggtttggtaggcttctgattcaggattaaaaggacggtgagccagtccctgacgtattttgttccattctttcaggaatgagagagtagaaggtgtaaaatagcaattgcagaagcattcccagatgtattgaatggcaagcggactgggatgcatcatatcgtcagcatagaaacgataatcacgcagctcatctatcatgatttcataagaagggaaatagtggcagaaatccatttgactacaaatctggtcaattgcgatgagcaaattcgccttactgagctggttgccatgcaaaccgtctttgaggtgacgtatcgggctgacagtaaatagacattgcagattcggacgtactgctttcagctcttgtaataaaggtaaatatatggcagttatttcatcggcgctgaccatcttacgttcaaataaccgggaagaaagcttatggcagtttcctacaatttccccattttctttccaggtatagacgaaggatgacccccatgtgaaaataatccagtcggcttgcttcagatttttatgcccttgtgcgatgcgttgattgattttcagcagacaatcttccgctttgtgagatgaaaaggtactgtggtgcatcagactgtaccatcctccttgctcttcacgtaaatcttctttttgatagagagcttttttcaataaacagtgtatggaagtcgctattgacatggggttatataacaccccgaaagggttcacatcgcaattgaatttatgttcggccagcaagtttccgatatgttcggaaaaacaggaaccccatatcatcagccggtcggtatgctgaattttagggcctttggcgggtagttcaactttggttctgaattccatggcaagagaaaatttactgcaaatgtaagtacattatatatatttatgctatttttgtgcgattaaagttaatgaggaacaggatggaacagacgacttcatacgatttgctgaataagatagatagcccagaggatttacggaaactttctgtcgaagcgttgccagaggtctgtaatcagcttagaaataagattatagatgaattgtctcgtaatccgggacattttggttccagtttgggggtgatagagctgactgtggctcttcattatgtgtaccagactccttatgaccgtatcgtttgggatgtaggacatcaggcatacggacataagattctgactggccgtcgtgaccgtttctgtaccaatcgtaagttgaatggtatttgtcctttcccttctccttcagaaagtgaatatgatacttttacgtgtggacatgcgtcgaattctatttcggctgcattgggtatggcagtagcagccgcgcggaaaggagaagataaccgtcatgtggtggccgttattggcgacggttccatgagtggcggtctggcttttgaaggattgaacaacgcttcttctactcccaataatctgctgattatcctgaacgataacaatatggccatcgatcgcagtgtgggtggaatgaagcagtatttattgaatctgcatacctccgagggatataaccgtttgagaaatgccttgtcgagaaaactttatcgctggggaatcctgaacgatgaacggcgtaagagcctgatacgtttcaacaacagcctgaagtccatgctgatgcagcagcagaacatctttgagggactgaatatccgttatttcggtccggtggatggacacgatgtcactgccttgacaaaggttctgaaagaaataaaggacatgaagggccctaaactgctgcacatacacactcgtaaaggaaagggctttaaaccagctgaagaagcagctactttgtggcatgcacccggtatctttgataaggaaacgggagaacgtatcgtttcggatacaagtggcatgccgccgttgttccaggacgtatttggaaatacgctgctggaattagcccgcaagaatgagaaaatcgtgggggtaactcccgccatgccttccggatgttccatgaatattatgatgaaggaaatgcccgaccgtgtgtttgacgtaggaattgcggaaggacatgccgtcactttttctggaggaatggcgaaagacgggcttttgcctttctgtaatgtgtattcttcgttcatgcagcgtgcatacgataatataattcatgatgtagctattcagaagttgaatgtggtactttgtctggaccgtgccggattggtgggtgaagacggacctacgcatcatggagcctttgatatggcttatttgcggccgataccgaatttgacaattgcttctccgtacgatgaacatgagttgcgaaaattgatgtacacggcccagttgccggataaaggaccttttgccattcgttatcctcgtggacgaggcgtactaacggattgggagtgtccgctggaggctgtagaagtagggaaggggcgtaagctgaaagatggtaatgacttggcagtgattacgattggcccgatagggaataaagccgcagcagccattgcttctgcagaaaaaaagctgggatgtagtatcgcacattacgacctgcgtttcttgaaaccgttggatgaagatttgctgcatgaagtaggacagaaatttacgcgggtgctgaccatcgaagacggagtgcgcaatggcggtatgggaagtgccgtacttgaatttttgtgtgaccatggttataagccgtgtgtcacgcggttgggacttcccgatgcttttgtgcaacacggatcagtcaatgatttgtatgccatttgcggtctggatgaaaaggggatatttagttcaattacacagataatgaatttatgaaaattattatagctggtgcaggtgccgtaggaactcacttggccaaactgttgtcgggcgaaaagcaggatattatcctgatggatgaggacgagagcaagttgagtgccatgggaaacaacctggaccttatgactgtcaatctttcgcccacttcgattaatggattaaaagaagccggagtcgcaggggccgatttgtttatcggggttatgcctgatgaaagccgtaatatgacggcctgtatgttggctacaagtttaggagccaagaaaaccgtggctcgtattgacaactatgaatacctgctgcccaagcataaggaattttttgctaagctgggagttcattcattgatttatccggagatgctggcggcccgcgacattgtggatgccgtaaaaatgagctggattcgtcagtggtgggaatttgcaggaggagcattggtcctgttaggaaccaaaatgcgcgaaaaggcagaaatcctgaacgttcctttgcatgagctgggaggaagaaacatccctttccacattgtagccattaagagaggcaacgaaacaatcattccacgtggagatgatgtgataaagttgaatgacattgtctattttaccacgacgaaaaagtatatcccttatattcgtaagatttccggaaaagaaaatgaagcagatgtccgtaacgtgatgattatgggaggaagccgcattgccgtacgtaccgtgcaatacatgcccgattacatgaaagccaaaatcattgagagcaatattgcccgttgcaatcgtctgacagagctggtagacgatggagtgatggtcatcaacggcgacggtcgtgacatgcagttgctgatggaagaaggaataaaaaataccgaagcttttgttgctttaaccggtaattccgaaaccaatattctggcttgcttggcagctaagcgaatgggcgtaaccaagacagtggccgaagtggagaatgtggattacatcagtatggccgaaagtctggatattggtacggtaatcaataagaagtttattgctgccagtcatatttaccagatgatgctggatgccgatgtctcgaatgtgaaatgtctgacttttgccaatgccgatgtggcagaatttacagtcaaaccaggagcaaagattaccaagcaggcagtaaaagatttgggattgcctaaaggtgcgacaatcggaggattgattcgtaacggtgaaggtattctggtaaccggtaatacgatgatacaggagaatgaccatgtcgttgttttctgtttaggaatgatgattaaaaaactggaaaaatatttttagccgtaaataattgaacactgagggtagacgattgagtctgatagcgttatttaagagaaaaagactatggaattgcgctatcagactcaatcgttttttattatgctggcctgcatgttcttttttgtgggatgcggctcttatcaggtagaaggagaggatgaaccgactgacacgtccggtccgtacggaattgatgtcaccttatccaatgcccagctttttactccgttgtatcctcttcatctttatttctttgatacacaaggcactgttacttggaatgaggaggtgttgactcaatcagaatggcctgtcctttccatgccggaaggagaatatgtattttctgttttatcaggtctgtcgtctggagattatctccctccgatgtctttaaattccaaacagttcttgactttttctgagggaaatcatgcaaaaactcctttggcaataggaaagaatgtcattaaattacagaaggatataaaagtttccgtctctctttcttatgccgtggcggctttgtatctttcctttggaggtcttcctgccgaagctgtttcggtagaagcccgtatttctcctgtcagttctggaataacattggaaggaactttaagcaatgatggcacatttgcttctgtgccctgtgaaaaaataaaaggagtgtggaaggccggacctatatatgtattcccttcggaaggtttgcagacccatctttctttgaatgttcaaaccgcttctgaggaaacggtatatggctgtttctttaattatccgttggaggccggaaagccttatcgttttgtcagtacgggcgatggggaaatatctttggaaggaaacaaccagatagccggctggacaccggaagtgtcggaagagtttccctttgagaatatgaccgaagaaggagagtgggaagaaccggatgctcctgatggaggagaaggtacggaaggcaacgaggacgaagatgacgggcaagatacagaggaggataccgacgtgattgtttccgaggtattgcccgagtcagaaaccatttggggaccttttttcgtgtggaaagtagaatctctttcggggaatgaggtgatggctacactcgtctctccccgtcagtggctgttgaaaaaagcggaagccatatctgtttgcgaggcttatgaagaagatggaatatcgggctggagaacttttaccacagaagaagccaaagaattccgcgaccagtatgatgatacgattgtcgcacttagcgatatgttgtcgaaaaacggattggatcgtttcaataagtatgattgccgctatttgtgcaatgactttaattccaccttttgcttctataatactcaaattgtgaaatccggagaaaccgtagactatgccttgcgtctggtgaaaaaagtacgcgtagaaaaagcaaaataaaagatgaaaaatcccgccacagaaatctcataggagagtatcttgtggcgggattcttattgttttaaatcagatgctgtgcttccagttccttggctacattttccagctcctgataccattcagcaccaaatttgcgaatcaacggctctttcagaaatttataaaccggcaggttttctttctttcctaacaaaactgcggccttacatacatcccatcggtggtagttgactgccttatacggaccgtaatctcctatgcgtatcggatacaggtggcaggaaatcggtttgtagaagttgcatttcccttcccggtatgctttttcgatggcacaataacaatagcctttctcatcgtagcaagtaaatacgcagtcctttccgttgacgatagaagtaaccagatccccttcttcgtctgtgtagaccacgccctggcggttgattacctcctgagcttccggagccagatcatcccagattacgggtagcacttcctccagtttttccacttcttccagttctacgggtgcacctgcatccccttcaatacagcattctcctttgcaggcgtgcaagtcacatagaaatttttcccggaatacatccaggcttactattacgtcgtcaatctgtaccataagtttctgtttagtgcggcaaagatacgaaaatcggtgaataacacagggataacttctgctgaaaataaatggccacacttgaaaaaaagcactacctttgcagtccgaaaaaatagaatgattcatatatgctgttaccctatttacataaagacctgatagaagccggttgtgatgaggccggtcgtggttgtctggcaggagccgtctatgctgcagccgtcattcttcctcccggatttcagaatgaaatgctcaatgactccaagaaactgacagagaaacagcgttatgaattgcgtacggtaatcgagaaagaagctacagcctgggctgtaggggtagtgacacccgaggaaatagataagattaatatcttgaatgcttcctttctggccatgcacagagccgtatctcagttgaaggtcactcctcagcatctgctgattgacgggaaccgcttcaatccttatccgggaattccgcataccactatagtgaaaggagacgggaagtatctttccatagccgctgcttccattctggcaaagacctaccgtgatgattacatgaaccgtctgcatgaggaatatcccatgtacgactggaagggtaacaaaggttatcccaccaaaaaacaccgggctgccattgctgcctacggcacgactccttatcatcgtatgagctttaatttgctgggcgacggtcagctctcccttgatttttgaagtgtggaaaaataaaacagcctgttaataaccggagaaagttattaacaagctgttgaaaactctgttcgtttttacaccgtaccctgaatggacaggaagaaaaagattcctgttcccatcatcagtatgccaatcagggcataaaaccagcgtgcctgtttccgtcctacgtttctcacgatgaactgtgtgttctgtgccgtgaaaaaccagttccagttgcagatggctgccagtacagacaaaagtccaaccaggacaaatagcccttgtataaaatagtgtattcccatttttatgcgttattctcgtcgaagcggactgtgcgtgtaccatcttctttttcttcaatgtacacgttcactgcattgcccggaagcagttcctcaatcagttccggccattcaatgaagcagagagcgccactgtagaaataatcttcatatcccatgtcgtacacttcttccagcttcttgatgcggtagaagtcaaaatggtaaatcagttctccgttttcatctgagcggtattcgttgacaatggcaaatgtcggtgagttgatgacatctgttacgcccaattcttcacatacggccttgatgaatgtagtctttccggctcccattttaccataaaaggcaaagaccgtattgtctcccatcgctgcgatgaattctttggcagcttcgtggatattgtccagtgagttgatttttatttccataatactgtgattttaacttgattccgatattcctaatgagccgttttcttgcgtagcatgcaaattaacttagctcctacataaattaaaattgagataaatatgattgctgctcccgaaggtacccgaagctggtaggaaagtagcagtccccccaagcagcctatgtaaccaatgccgacagacagccagataatgcgtttaaaactataagtaaagagattggccgtcatctgcggaagcgtgagcaaagagatagccagtacgatacccaccatgcgtaagcaggctacgatggtcagggcgatgaaagccatgagcgtatattcgaaagcagccacaggaatgcgctgtgaacgggcaaattcccggtcaaaagaaatggctgtgataggccttagaaacaatgtaaagaatagaataagtgccacactcaagatagccagcagtgtaatgtcactccggttgatggtcaggatgttaccgaagaggaaggacgacaggtcgggcgtgaatccgggagccaagaagctgaagatgatacctactgccataccaaatgtccagaataccgcaatggcagaatcttcccgcatgtcactgcgcttgctgagccattccactccgaatgctgacagcacagagaatatggccgcacttaaaatcggggagatacctgcatataagccgataccgattcctccgaaagaggcatgcgtaattcctccgctgataaacaccagtcggcgggtaacgatatacgtgcctataattccacaggcaatgctggcaaacagacttcccagcagggcatgttggaaaaacgtataatgaaatagttctaatatattcattggtgaatagcagcttagtgaaaacgacgttctccgacaatcaggaacagttcatctttcagttcgtcaggaatttctattccgcggagttgcaggctgcggcaccagccggctacctcttcctccttcatggtatacatgatttcccggaactcattgatttcctcttccgtgtagttgtccgacggatgtcccttgaagcggtccagctcctcatcgtcgtaatattctatttgtttgctgacagctgccagcagactctctttttcacaaatctcatgctgtccgcagcattcttcgtccacggtttttatttcgggggcttctttcagttcccctcgttctatttttttctggatagagcggttataaaagaatccggctatcaatccgaaaatgactattccaattaaaataatgacaagaatccacataatgaatcagattaaagttgggtgatacgaaaacctgccgtcagtaaatcttcccagaaccggggataagacttggatacgacgtgcggattgcggatgcgtaatgcactgttacagagtgcagctggtgcgaaagccatggccatgcgatgatcctcatacgtgtcgatggcaggcgattcatccggagcacatcgggtaccgttccatgaaagtacggaaccttcactttcttccagtacataacctaatttacgcatttcggcaattaaggcagccatccggtcggtttccttgattttcagactttgcagtccggagaaacggaaggggatgcccaacatggcgcaagtcaccacgaaagtttgtgccaggtctggctggttcacaaaattatattccatccggtcggtatgcgtatgtgtttgtttcaatgtcacgctgtttccttctctttgcgtgcagacacccaactgctcaaacagctcagccacttttgcatccccctgcggactctgtgcaaatagtccaggaagtgttacgacggcttcatgcttggataatgctacgatctcataccagtaggaagccgcactccagtcactttccacatagtaaggaacaggatgataaggctgtggagccacctgcaaggtatggtcggatgtccattcagcttttgccccaaaatctttcatcactttcagcgtcaggttgatgtaagggcgtgaaataatttctccttccagttccaggttcaagccgtgtgccagcatcggtcctatcatcagcaaggccgagatatattgcgaactgacatttcccggaagacagagtgaatgtctttccagtgcctttcccgtaatctttaacgggggataaccttcattttccgtgtattcaatctgcgcccccagacttctcaaggcatccactaaaatcttgatagggcgttgtctcatccgttcggttccggtcagtacatgtgtaccgggagttacggacaaataagccgtcagaaaacgcatggccgtaccagcagccatgatgtcaatcgtttccggcatgtgtgtcaatgcttctatcattacgcgcgtatcatcgcagtccgacagattttcaggacggcatgtactgcccgccagtgcattgatgataagtgccctgttgcagatacttttagaagaaggcaactgaatacaagtctgtatgtcagccggtggggtgatttctatacacttcatggtttaatcaaatctttacttcgcaaagttactacaaaaaagtgaaatgcggaaagatatagtgatagaattgagttacaagggttttggttgaagtggcgataatccgtgaagccattacaatccctgccgaagccaaatcctgacgccgctacgttacttgttcgtaaccatgcccgaaaatgcgacaaacgggtacgaatagcgaaacaaggctctaaggaatagtgagttatccataactcatgcgaaaaatcaggttacggaaaaagattgcgccgttcctccccgttttgcgtaccaacaccggactcttcaccaactaattttgaaacccaaaaattaaggacaatgaagagtacattttcagtaatctactacctcaagcgtcaggtagtgaaaaaggacgggacagttcccgtcatgggacgcatcacggtggacggcagccagacacagttcagctgcaaactgactgtcgatccgaaactgtgggacaccaaaggtggacgtgtcacgggcagaagcacggcggcactcgaaacgaaccgtatgcttgacaagatgcgggtacgcatcaacaggcattatcaggaaatcatggagcgtgacaacttcgtcacggcggagaaggtgaagaacgcctttctcggactggaacaccgctaccacacgctgatgcaggtgttccgccagcacaacgaggactacgagaagcaggtggaggcaggcatgaaagccaaaggcacgctgctgaagtaccgcaccgtttacaagcacatgcaagagttcctcgacatccgctaccatgtgaaggacatcgccctaaaagagcttaccccggctttcatctccgacttcgagatgttcctgcgcacggacaagcactgctgcaccaataccgtgtggctgtacgtctgcccgttacggacgatggtattcatcgccatcaacaacgagtggctgacgcgcgacccgttccgcgagtatgaaatcaagaaggaggaaacaacacgcagtttcctgaccaaagatgagatccgcctgctgatggaggggaaactgaaaaacgccaaacaggaattgtaccgcgacctctacctgttctgcgccttcacggggctgtcgttcgcggatatgcgcaaccttacggaagagaatatccgcacctacttcgacgaacacgagtggataaacatcaaccgccagaaaacgggcgtggtgtccaacatccgcctgctcgacatcgccaaccgcataatcggcaaataccggggactgtgcggggacggcaggatatttcccgttccgcattataacacgtgccttgccggtatccgtgccgtcgccaagcgttgcggcatcaccaagcatatcacgtggcatcagagccgccacacggcagccacgacgatattcctctccaacggtgttcccatcgaaacggtcagctccatgctcggacacaagagcataaagacgacgcagatttacgcaaagataaccaaagagaagctcaatcaggacatggagaaccttgccgcaagattgaacggcgtcgaggaatttgcaggttgcaccatctaaaaagaaaagccatgaaacgtgacacaatcatcatcgaggacaaggcagtcagcgtaaccggtaacgacgtgtggatgaccgccaccgaaatagccggattgttccatacgaccgtcccggcagtgaacgccgccatcagagccgtccgcaagtcggacgtgctgaacgactacgaggtgtgccgctacatgcagcttgaaaacgggctgcacgcggacgtgtacgcccttgaaatcatcatcccggtcgctttcagggtgaatacctacaacacccacctgttccgcacatggctggtgggaaaggcactctcacaagagaaacggcagacatacgtgatgttcatacagaacggaaaagccgggtattgctgattgcacataccccataagacaagtaaacgggtagcaccacaaaaggtgtcacccgtttactttttcatgaaaccgcctcactccagcggcttgcggtagttcgcttccagtaccccgcgcagccccgtttccgggtaaagcaccttccctcccaaaagtatgaagggcaacacgcggttgttgcggtattcctgcaaggtgcgccggctcacacggagcagttccgacacctcgccgtccgtcaggtaacgttccccgtccagcggaggacggtagctttccagaaatgcggacagccatttcgagcctttgcgcatatcctgcaccacagaggctatcggctcgtcttccatcgtaaaaacatcgttgttctcgttcatcataacttcggattcagtgggtgaataaatcaaatcatctgccgtgcggatagagcgtgc

SEQ ID NO: 3749 - DNA, 46109 bp, Unknown
  gut microbiota DNA sequence
attaatcttcaaactgacaactattttcagtacacttcaaacgcaagtgcgtttgatctaaaacgcaagtgcatttgaagtaaaacgcaaggacgttttaccttaaacgcaagggcgtttttgtctaaacgcaaaagcgtttgaggacatatcgaaaaacgcttaccaactattctttcttacagaataagaatggttagttaaataaaaatggagttagcctaataaaaaatccggattactcgttttagagaacccggattacacgttgtattattcgtagaatttctatcatttaaacatcttctccaaatcatcttctttcaatacggccagtacagtctttccatctggcgtatagttcggagtagatacggcaaacaaatcatcgaccaggcgattcatttcctcatcggtcagtacctgtcccggtacaatggctgctgcttttgccaatgaaagtgcaagcatactttgtacttcttccttcactttacaacctttttcaatcgccgtctgtaccatatctgtaaccagtttctctggattcaatccctcaattccagctggaataccgttaatagaataagtaccccctcccagactactaagatcaaatcccaaggcattcaaatcgtccataaactcctccagtacaggtatctcagaaggagagaaatgtaccatatccggaaacagcattcgctgggaagcattctttctattttctatctgcgccatatagcggtcgaagagaatacggatgtgggcacgctgctgattaataatcatcaacccagactttacagaagtcaagatatagctgcctttatactgataatggtgcatggaattttcctgagactgcttttcaccttcttcactagagaaagatggagtaacggcatcttcctgagaagcctgtccccattctgttgattctgggaaaaacggtcgtacttcttcttccggttgaatatccgaatccgatgaagtacgttccagcccttcaaacaaaggttcccattctacccgatttttgtgactgccaaacgaaggagtataatttccgcttctgccaaaatccggcattccacctttattcatggaagagcgtacagaggtacccgcaggcgcactccattctcgcacatcctgtccgaagctttctctttccgtttctttattggttgccgatgcagaagagtaagcagaaggaggcactgccgctgtattaaacggattataagaagggtcaaaactggtttgaggaggtgccaccgtataaggagaattctcaaaggcaggaatgtccggcataccttctgtatcaaaatcaatcgaaggtaccgcgttgaaacgtcctaacgtctctttgactgcagccgaaagaatctgccacacggcttgttcattctcaaacttgatttctgtcttggtagggtgtatattgacatctatatccgaaggttccacttcgaaataaatgaaataagagacttgttcacccaccggaatcaggttgtcgtacgcactggatacagctttatgaaaataaggatggcgcatataacgaccattcacaaagaaaaactggcgtgcccctttcttacgggccgattcaggacgaccgatatatccatgtattttcaccatggtggtatcaatgtccaatgaaagcagctcctggttcagtttcttgccaaatacccccataatacgctgccgcaaaggaatggccggcagattcagcatctcggtgccattatgactcagcacaaaagatatatccggattgaccagcgcaatgcgttcgaattcagctacaatgttacttaattccgtttgattggatttcaggaacttccgacgggcaggtacattgaagaacagatttttcacagagaagtcactgcctcgctggcaggctactgcctcctgcttttctacctgggaaccggaaatctgaatgaaagtacctaatccgtcgtcactggaacaagttttcagttccacctgtgctacggcagcgatggaagccaaagcctctccacgaaagcccatggtatgaagggcaaacaaatcggccgcctcccgaatcttggaagtggcatgacgttcaaaagccatacgggcatccgtttccgacatacctcgtccgtcatcaatgacacgtatacatgtttttccggcatccgtcaccagcacttctatattttttgctccggcatctacagcattctccaccagctcctttatcacagaagccggacgctgtatgacttctcctgccgcaatctgattggctacagaatccggcaacaaacggattacatctcccgatgtcatagtgtaaattctcctgtaatcagataatgtaaaatatatagcaataccacaatagccacaaacatggctccgtaactcagaggtttacgtccgctttccttgcgacgcttcagataggtagtaccttctacaaacttaccacgaatgtcttccggattaaactctttaggaggaagcattcccagttcacgtttggctgtctcttctattttctgcagtttttccttgcgttcatccacataaatgtattcatgacggaatccgcgaggctttctcattgtaaacattcccatatattattcctccttcttattttcaaacaatcgggcattcggcaaaacgaccggaccacgtacatttttcttcagctggtcttccactcgtttttccctccaattaaagatgtcggctttgttgagcggacgaatgtaatcaaaccacacaaaattctccagacggtcttttccggcaggaatctgcgacatcggatacaacacaccattggacttggggctcatcaccatgcgttctatcttacggtcttgcagatagatttccagtttactggtttcagatacattcattcctatcagcgtactgtcggagtccatcggataataaacaactcgtacggaacctatcacttccgtctttcgcatttctccattcgtgaaataggacttcatctcttttcccgtcacctggttataaatcgttgaatccacacgttctaccgaaagtgcctgccctatgatgtgcgaccagtcaattgtgctgtcgttcatatagacctttatcacttcgcctaaaagctgctggttcttgttccagataatcgggtcacgatacatcgtaagacaactgtccactgtagagaaaactagcgaatcggccgtaccctgcacatcggtacgataaaaacgtactttatggaaagctctcatttcacggaacatggaatcggtattctgatggaaagtttccatcagcagagtatctgcatgaagaaacaaactgtcgccctgagaatagtctatagctacggcactatccgtagcaaaggcatagtctgtctgctcgttataatagccatattctccggtaagcatgttccggttgattgtatccgtcatcaccatccgactgaaaacctctcccacgccggtattacggtcgtagaaaagcgtatcaccagtcagctgttttccctgattggtcagcacagaacggtcatacaaatcggccttacccgttacggtattgtaagttcccttttcagaataaatgtggttggcatcgctccagatatccgaagggccgacaatatcagctaccttcgaagccgtgttgtaacgtaaggtatccgacgtcagtgtaaactgggggttcaccagcttcacattgtaattaaatacggattgcttggtctgaggactatattctccccactcggaggtcagcacattctgctcatccatcagggttcccccatcaaagaaatatcccaagttgtagacccggtcataattcaggctatcagtcagcaaggtagtcgtacggttctccatccggacattacagcgcatctctgcaatctgtgtcaatccatcatagtacaaccggtcgccataaagaaacagcgtatctccctgcaccattttcacattaccaaaagcctcaaagctgctaaccttatcgtagtaacatgcactgtcgcaatacatatacacactatcatgacgaaacctcacatttccggttacaatctgtgcgtccggatgagttgcatccttacgcaacaaatcagaatgtaacaaatagactttacttttagctaccggacgctgcttggaatcctctggcttttgtttcccctcagcctccgttttcgggcgcgcagtctgtggagggacagctatccccccttgtgccgacaagccaagaatggtcaggcaaaatgctacaaaaagcaaaaaaattgcagactttctcatcactatttaatccatcccggatatttaaaatcacacttacgccaagacgggttgatacgcacgtaagtatttttttgcttttctacaatccatttctgcagtttttcttcactacggttggccgtaacaatgtctttcagacgctgatagtcttctgagattgtagctttatgtccgtcaatacgattcttcaattttacgatagcacacacttcttttccttttgcattaatcattgtaaaaggtttggaaacttcaccaatctgcattccctctacggtctttgcaacttcctgagaaatcaggccagccagctgctgcatttcaaaacgagaggtagaagtctgcgggttagccagcaaaccgtggttgttgcgtgtatctttatcctgagatacccatgtagccgcttcatcaaaagttacttttccttttcggatatcgttagccagtgtatccagtttattcagttctgcctcaatttctttctcatccacacgaggcttaatcaaaatatggcgatagcttacacggtcaccacgcttttcaatcagctgagcaatatgataaccatattctgtttcaaacacttttgaaatcttcttcgggtcagtcaggttaaataccacattggcaaactccggagtcaattctccacgacctgtaaagccatattctcctccacgacgagcagagcccgggtcttcagaatacatacgcgccaacgtagagaaagtagtttctcccttattgatacggtcagtaaaatcacgcaattctttctttacacgttcgatttcttcttccttaatcttaggctctctggtaataatctgcacctctacctgagtaggcacaaaaggaatactgtcctgaggaagcttactgaaatagttacgcacttccgcaggagtcagcttgatgtctcctacaatcttcttctgcatttcctgtaccgtcaatccgtcacgaatattctcacgcaacatttcacgtatctgggtagaagttttattgtaatattcttcgagtttttcttttgaaccaatctgttcagtcaaccatgaaattcgtgtttctacctgctgcagaacctcctggtcgctcacctcaatactatctatctcagcctggtgaagaaaaagtttctgcacagccaattcttcaggtatcacacaatagggatcaccatcaaaacggcgaccttcatactgtgcattcaaacgctcattctctacgtctgatttcagaatagcttcatcgccgacaacccacaccacttcatcaatcacattatcttgtgccacggcgggtactgttcctgtcaaggcaagcaaaacagccaagacaccagtcataatcaatttattcattttctgtctatttgatttgttttggtccattacattacaaaggacgaagatacggcattaattacttttttccgctacaattaacggtttttaaaatgtcttggttaatttcaatcctgaagcctcgctttaactcttccatttgtgttctctccgtccacaaacgataatcacgctgcacttcattgcgcacatcctgaaagtcttccggccctttcttcaggcgctttcccaatacaaaagcataaggtaaatccgtacgaggagtgaaatgtccgcatttaaaagccagcttatctacataaggatttgtaccaatctgaaacaagcctgtttctacaacgaccttccattccggattctcttgagaaaaagcggaaatttcttcattccatttatttaagggacatttcttcagcctctttttcagctttgaagccactttcttattcaaacaatgaatcactcctcctttaaaatgaggcaaatcccatgcgtaatcgtttttatgactttcaaaatagctctgcaattccttatcagaaatattacctgattttgtacctccatggcgcttatcccaatacgcagccaataagccatcggaaacttgacacaactccattcgagtcttgttcaaaagactatctttccgctcggtaaagcctgaatcagcaaccttttgcagggccgcatttccagtcgtttctgatggatatactccttgcctgcgatccaatagatacacgatgtgaatacctaaaggagaaaaaaatggagcagaataattaccttttttcaatgtgttcaattgcccggtaaactcttttatcagacatctttccggaatccactccccatccaaataaggagaaggcaagggagccttcacataagattgtgccagtttttcaaaaggtataccattttttaaagccgtataaacagaatctatacgctgtctggctacacgttcctgttcggaagaagcatgttggggcaaaagaaatgaaatctgacgaaatcttacccaatttaaaagagtatcttgtttttgggacattcccctctcttccgatttcagaatttcattttgcaaggcactgcattgcaaccggaaatcggtgatagtatcccagctttgtcttttagcatctgccaccttcaacttataatacaagaaatgaggcaagaaccgttctacagatacacgactaactgcatacacctgggtataataatgctcaaactcctctaccgaagtttcctctccatcaatccgaaaaagtaccctgcgatcttctgcataagaaacagagaatttcagccccatcaacaaacataggaataaccacgcaattctacacataacagattctattcatcatttcattaaacaaaaaatcatcctgttcgccagaacagacttactgaaagcaagtctgcctgacgtcagaatgattatatccgtattataagtcaaagattatcttactgaggacgactatagttaggtgcctcacttgtaatagatacatcgtgcgggtgactttccagaactccggcattagtgatacgagtaaacttcgcattatgcaattcttcaatattatgagctccgcaataacccataccggcacgcaaaccacctaccagctgataaattacttcatacaaagaacctttataaggcacacgagcagcaataccttctggaacaagctttttcacatcggtagttccactttggaaataacggtcttttgaaccattttccatagcttccaatgaacccattccacgatatgacttaaacttacgaccattaaagatgatggtatcgcccggagattcctcagtaccggcaaccaacgaaccaatcattacgctgtaaccaccggctgccaaagctttcaccacatcacctgaataacgcaagccaccatctgcaatcaaaggaatacctgttccttccaaagcctttgcaacatcatatacggctgtcaactgaggaacacctacaccggcaaccacacgagttgtacagatagaacccgggccgatacctacttttactgcatctgcaccagcttcagccaacatcttagctgcttcacctgtagctacatttcctacaacaatatcaattccagggaaacgtttcttagcttctttcagcttttcaatcacgtacatagaatgtccgtgagctgtatcaattacaatggcatctgcaccagcattcaccaaagcttccatacggtcgaatgtatcagcagttactcccacaccggcagctacacgcaaacgacctttagaatctttgcaagccattggtttatcttttgcttttgtaatgtctttataagtaatcagaccaatcagctttccatccttgtctactaccggaagtttttcaatcttgttttcctgcagaatcttggaagcagtctccatgtctgtacccggctctgttgtcacaatattttcctttgtcatcacctcatcgatacgcttattcatatccttttcaaagcgcaggtcacggtttgtaacaataccaaccaagtaattctcatcatctactacaggaatacctccgattttgtattcagccatcaaatcgagtgcatctttcactacagagcctctcttaatggtcaccggatcataaatcattccgttttccgcacgcttcacaattgccacctgacgagcttgttccccgatagacatgttcttgtgaattactccgatacctccttcacgagcaatggcaatggccatctgtgcttcggtaactgtatccatagctgcagttacaaacggaattttcaactcaatgttacgtgaaaacttagtcgagagttcgactgttttaggtaaaacctcagaataggccggaatcaacaatacatcatcgtaagttaatccgtccataacaactttatctgcaataaatgacatagggctttatgctttagattttattgcgtgcaaatatacagaattttctcaaaaagtaaaaaagcagttaacatctttttcataccacatacctatcaaataaaaacagctgcttgcaaggaacacccctcacaagcagctgcacaatatcattaaataaatgattaattagccatttcagaaatgaacttgatacgtaccagacgaatttcgtcttctgtatagtcgtcacccagttcatccattgcatcatcaatcttatcagttactgattccttgaaataatcataaatatcctgcatgtggtcttcatccataatttcttccaagaaatagtcaatattcagtttggttcctgaatatacaatggcttcgatttcatccagcaactcaccaaattcaataccttttgccactgcaatatcatccaaagcgacctttctatcgatactctgaataatagagaccttcagcttagatttgttagctacagtacgcactctcaaatcttccggacggtctatttcattttcttcgcagtgcttcttaatcaattcgcagaattcctgaccatagcgtttagcctttccagctcctacgcccggaatattctgcaattcttccaaagtaaccggataaatggtagccattgcctcaagagaaggatcctggaaaatcacataaggtggcacatccagtctctttgccattttcttccgcaagtctttcaacatggaatacagcacggggtctactgcacacgaagccccacttctcatcggagtttcatctacctcttcttcttcaaagtctgcatcctcaactatcttgaacgacttcggttttttcaagaacttatgcccttctggcgtaacttttaataagccatagttttccacatcctttgccaggtaaccagcgataagagcctgacgaatgactgcattccacaatctttcttcttctcccatacctgaaccaaacacctctaagtcttcatgcttatgtgcaagcacttcagatgtttctttacccaacaatatatcgataatataatcttgcttaaagttttcttttacagcaatgattgcttcaatcactgcacacaacgaatcctgagcctccacttgtttctttggatttaaacagttatcacaattaccacaattatcttccgtatattcctctccaaaataatgcaacaaaatttttcttctacacactgaagattctgcgtaagcagctgtttcctgcaatagctgacgtccgatttcttgctctgaaataggctttccctgcataaatttctccagtttctgcaggtccttattggaatagaatgtaatgcactgtccttctccaccgtcacgtcctgcacgtccggtttcctgataatacccttccaaactcttaggtacatcataatgaatcacaaagcgtacatccggtttatcaatacccattccaaacgcaatcgtagctacaatcacatcaatgtcttccttcaggaaagcatcctgattcccattacgggtagcagaatccattcctgcatgataagcgcgagccttgataccatttgccagcaatatttcagtgagctcttccaccttcttacggctcaagcaatagataatacctgacttgccttcgttctgcttgatgaacttgataatatccttatccacattagcagtcttggcacgtacttcataataaagattcggacgattaaaagacgaacggaattccgttgcatccatcattcccaaattcttttggatgtccatctttacctttggagtagccgttgccgtcaaagcaattaccggagctttcccaatttcattgattatcggacgaatccggcgatactccggtcggaagtcatgcccccattccgaaatacaatgtgcctcatccaccgcataaaatgaaatcttcacgtgtctcagaaaatctacattctcctctttcgtcaaagattcaggagctacataaagtaactttgtctttccggccatgatgtcggctttcacctgatctgtagccgattttgtcaatgaggaattaataaaatgagcaatgccatcttcctcactaaaattacgcatagcatccacctgattcttcatcagggcaatgagcggtgaaatcacaatagcagttccatccatcaacagagaaggaagctgatagcataatgactttccacctcctgtaggcattaacacaaacgtatcctttcctgataataagtttcggataatcgcctcctggtttcctttaaaagtatcgaatccaaaatactttttaagagctgctactaaattgatattttccgccattgttcttggatttagattttcattgattgtagaaattttgtttccgcatgtaacaaagttataaacaacttttcatattacacaaatatttcagggaatatttcatcggaagcttttattttctcactaaaaaacctttacattatgccatttgcagacgggaaacatttgccttccccatttgctgtttggcgtaatccaacgtcaccacaaaacgttcggtctgttgtgacggaatttcaaacatgacatcattcattatggtttccacaatagaacgcaaaccacgagcacctaatttgtactctatcgccttgtcgacaatatattcaaacacctccgattcaaattccagtttcaccccatccatctcaaacaattttacatactgcttgataattgaatttttgggttctgtaagaatattgcgcaatgccgtacggtccaatgggttcaagtaggtaagtaccggcaaacgaccaataatttccggtatcaatccgaatgatttcaagtcctgaggagcaatgtactgcatcaaatttccccggtctattttcaccgcttccttcgccgcactatatcccaccacattggtattcagccgttgagcgatttttcgttcaataccgtcaaaagctcctccgcaaataaacaggatattcttagtattgaccggaatcatcttctggtccggatgcttacgtcctccctgaggaggaacattcaccacagaaccttccagcagcttcaacaagccttgctgcacaccttctccacttacatcacgcgtaatggaagggttatctcctttccgggcaattttatcaatttcgtcaataaaaacgataccccgttccgcctcctccacgttatagtcagccacctgaagcaagcgggtcagaatactttcaatatcttctcccacatatcctgcttcggtcagtacagtcgcatctacaatggtaaaaggtacatgaagcaacttagcaatggtacgagccagcaaagtctttccggttccggtgcttcccaccataatgatgtttgacttttcaatctccacatcattcttatccttaggttgaagcaaacgtttgtaatgattatacaccgctacagccaaatagcgttttgcatcatcctgaccaatcacatactggtccaggaattctttgatatccttcggcttagggagctcagacaaattcaggtctgtaggtccctgcccttgatgatgcatcgcttcttttacgatttcatgtgcctgttctgcacaactgtcacagatacatccattcactcctgtaatcaggaagcccacttcgtcttctgtgcgaccgcaaaagctacatcttcttttcgagtttcttgaagtccttttttcttccaaagcctatctagtttttaagtaaatcacagtgttacaatgaaggtttacgagatagcacttcatcaatcataccatactctttagcctcggatgctgtcatccaataatcacggtcagaatctgcccaaaccttatcaaaatccgtatgagagtgatcggcaatgattgtatacaattctttcttcagtttctgaatttcacgagctgtaatttcaatatccgaagcctgaccttgcgctcctcccatcggctgatgaatcatcacgcgtgaatgggtcagagctgaacgttttccttcttttccagctaccaacaatacggctgccatagaagctgccatacctgtacaaattgtagccacatcgctactgataaactgcatagtatcataaatacctaaacctgcatacactgaaccgcctggggagttgatataaatagaaatatccttaccagaatccactgaatccagatacaaaagctgagcctgcaaagtattggctgtataatcgtcaatctgggttccgaggaaaatgatacgatccatcatcaaacgagaaaagacatccaactgcgtcacattcaattgacgttcttccaaaatatacggattcaagtatcctgcttgcgacttgatgacatcatcaagtaccatactgttcattccgagatgcttggtagcatattttctaaaatcgtccatcataatccttatattaattctacaatataaaagaggcttttaaccccctttcttctgaaaaaacaaaagtacaaaacacttctatcttacagaagaagtcaagttaaaagcctccttttttagaatattttagcaatcaattttgagagccaaattgcttattgaaacattttgttgaattcttctgcagaaacagctttgtgattcaatgttacctgacctttcaagatttcagacaacttagattcaacaacgcggtttaccagagcttctacactttcacgtttcttcaacatttcttttgaatagttttccaacaattcatcaggaacgttaatcataccatactgagcaaactgtgcacgagtagcttccttagccatgttagtgatgtcagcctgttctaccttaatatcgttagcagctaccagtttttctttgatcaggtgccaagtcagttcttccaggctcttttcgtagttttcagaaacgaattcttcacctttttccttgttgttttccaacatgatacgtttcatcagttcatcagcaaactgcagtttaccaaccttttctgacaagtaagtacgtacatccagcaagaacttatagtcgctgtcagcttcaaactgttttgcaattgtttccttaatctgagcacggaattcttcttcgctgtgagcctttccttcacccaatacctggtcaaacagttcctgagttaagtcacccggaatcatacgagtgatttcttcaatctggaagctgaagttacctttgtaattagctacttcttctttcttcactttcaacagagaagccaactcagcttcattgttatcgaaagcaactgacggattaaataccaatacagtatttacctttgcatcgttgaagatagctttctggtcatcgttcttcatgtatgaaggcatcattactgcaccttctacctgcacaccaccttcttttgtattgccgttttcatccaactcagccaacagacctttcagcatatccttatcctgatagtcttcaaccttgtcatacttagcagtacgctgtctgtacatatttacctgctgatctaccatttcatctgttacgttaatatcatagtagtcaacagtatcattattagacaaatctacattgaactcaggagccaatgcaatatcgaaagagaattcaaaattctcatcagtttcaaagtttgcgttattttctttcggcagaggagtacccaacatgttaactttgttttcacggatatactcacctactttttcctgcaacagtttgtcaacttcttccagcaatacagaagttccatactgttttttaatcaatcccataggaaccattcccttacggaatccaggcatatttactctctgacgaagagttttcagtgctttttcaactttttcctgataatcagctttttcaatctgaacagtaagcacagcgcttacgttgtctacattttgcaatgaaatattcattttcgacttatttatttaattattaattatttctcgtatttaccaaaagaggttgcaaaaataatgtttaatctttcaataaccaaactgacaagctaaaaaatctttacggcttctgaatccttgtcaaccaaccaaataaaaaacggcagaaagcatatccaccttctgccgttccttattatctcaacctgagtcttatcaatatcaaactttacgagccttgctattttcctctttcttcaccttctgcagcaagtcggatgcgaatatgaagttgttcaaccgctcgttcgtggcattgaatacctcgtcttttgttccttcccattccttgtgcccctggtatatgtacaatatgctttcaccaatacccatcacagagttcatatcgtgcgtattaatgattgtcgtcatattatattctttggtaatatcatgaatcaaatcatcaatcaccagcgacgttttagggtcaagtccggaattcggctcatcacaaaacaagtatttcggctgcagggcaatggcacgcgctatagccacacgcttctgcatgcctccgctgatttcaccgggatattttgactgggcatcaatcagattcacacggtccagacaaaactgcgcacgcttcaccctgtcccggtaagtgtcattggaaaacatatccagcggaaacatcacattctccagcacagaaagcgagtcaaacaaggcggcgctctgaaatatcatccccatctcccgtctcagcgccttcttttcccgcttccccatatccagcaggttacgtccgtcatacagaatttctccgctttccggggtaagcagtcctacaatacatttcatcaacaccgtctttccagaaccactctgcccgataatcaagttggttttcccgttttcaaacgaaaaattaatatcttcaagaactgtacgtccttcaaatgacttgcatatagaatttagctgtatcatcccatcaacaattgtgtaagtatcaaatctgaaaacaaaatcaagacactgcttgaaaccacagagtccgtactggctttaccgaccgcaatagaacctccttctaccgtatatccaaaataagcagacacactggctatgataaaggcaaaaaataaggatttaataaagctacaccagatataccattccacaaagcaatactgtaaaccatattccaaatccgtcgcattcatgataccggcaaaccaggctgtacagaaagcccctatcactcccgcaaaaatactgaaaatcaccagaaaaggaatcatggtcatcaatcccagaatctttggaagaatcagataagaggctgagtttactcccataatttccagtgcatcaatctgctgtgtcacccgcatcgtaccaatctccgaagctatgttcgacccgacttttcccgctaaaatcaaacacatgatagaagatgagaattccagcagcaagatttcacgagtggtatatcccaccacgaaacgcggcatccaaggactttcaatattcaatttaatctgaatacaaattacagcaccaataaaaaaagaaatcagcaacacaataccaatcgaattgatacccaattgtaccatttcattcaggtactgcttaaaatacatccggaaacgctccggacgggaaaatacacgccccatcaacatgaggtattttccaaggtttgtaacaggctttatcatattattacaatcatgtttgacacaaaagtagtgctttttagctatattataataaaagacaggaggattttcgaattaagaaccacagaagccaagatttttactacttttgcacgactgaacagctaacaaaaggacaatggcagcacaagaaaatcaagaatctacgaccgaaaagtttgaattaccttcagacggcagaatggtgctacgaaccgagaacctggtcaaaaaatacggaaaacgaacagtggtgagtcatgtttccatcaatgtgaaacagggggaaattgtaggactgctcggccctaacggtgcgggtaagaccacctctttctatatgactaccggattgattgtccccaatgaaggacatatttatctaaatgataaagacataacttcctatcctgtttacaaacgagcccaaaatggcatcggttacctggcacaggaagcttctgtgttccgcaaaatgagcgtggaagacaacattgcttctgtattggagttaaccaataagtcaccggaataccagaaagagaaactggaaagtctgattgccgagttccgcctacagaaagtacgcaagaacttaggagaccaactttctggaggtgaacgccgccgtacggaaattgcccgctgtctggcaatcgaccccaaatttatcatgcttgacgaaccgtttgccggagtagacccgattgccgtggaagacatccagcacatcgtctggaaactgaaagacaaaaacatcggtattctgattacagaccataacgtgcaggaaacacttagcatcactgaccgtgcttacctgctgtttgaaggaaaaatcctcttccagggaactccggaagaactggctgaaaacaagattgtccgcgaaaaatacctgagtaacagtttcgtactgcgaagaaaggatttccagttgaaagaaatcaaagagtaaagatttcacataacataacaggcagcaaagcaccacatttgttgtacttgctgcctgcttccttattacaaacatcgaaccatgactactatttattagtggatgtccatccacttcccgtttttaatcggaaaaaatgttttttgcttgcatccaaatatactcctccgtttgtagaataatcagagggaaatcaatgttgtcctaaacgatttataggtacgatgaatatgaggttgtctcattttgagacagcctctctttacttcctttttttgtttttatcgaaaaacgtttaggacaacattggtatgctccagtctttttgccaggaaacacttctcccctatagagcagctcacattggagcgttctttacaagaactggattcagccatattgcagaaaccgatgttccataaataccacgaagtcagactggacagtttcaaacaagaattgagccagacgcatgatttatggaaagcctatcatctatgcggatcactgttctacgagtacctgcattttcaagcagactcctccttacactacattgaacagaaagcccagctactacccttattaaaggctcctcatttacaagatgaaatccacataaaccgtgcagaagtatacaacatcaaaggaatgtataccgaatccctcgccgaactacaagctacccccccgacaaatgacagagggaatgcgacgttattactacagtgtgtatgccaattactatgcgtatctggccaattatcatcaggtagaagaattggacagaaaatacaaaaatctgtctgacctttacagggattccgtattcatgctgctgccgcccggaaccgaccgtgaaattatatttgcagacaaactgatattctcccacaaaccggaagaagcaattcagaaactgaaagaacaactacgcacaaacaaagacaccaaacggagagtatacctttactatgtcctttcggatgcctatgccatgtgtaatgactccatatctcaaatgtattacttggcccaaacagccatacaagatttacacatgtctgtacgtgaatatgctgctttgcaaaaactcggatggcagctttataaacaaggaaatcttgagcgtgcttacaactacctgagatgttccatgaacgatgcatttgactgcaattcccggttacggtttgccgaaataaaggactactccattgtagtaaacaaggcttatatagacatgcagaaccagaaatatgtaaccatgcgccgtactgtcattgtcaccgttatgctggtggtagtgatgcttgccagcatcattatgctagtctattggatgaaaaaactgcaacgcatgaaacgcttgcttgcagaaaataacgagcaacttacaataaccaatcataatctggccataaccggaaaaattaaggaagcctatatcggacgttacctgagccactgtgtagagtatatcgaaaagctagaccaataccgccggtcactcgtaaaactggcaatggcttcaaaaatagaagaattgttcaaaacactgcgttccgaaaaattcatcaaagaagaacgtgaaaacttttacaaagaattcgaccgttcgttcctggatttatttcccaatttcgtgaacgacttcaaccaattgctgccggaagaccaacgcacctatcccaaaccggatgaattactgaacacggaacttcgagtcttcactctgatacggcttggagtgaccgaaactgccaacatcgcctattttctgggatattccttgtctacagtctataattaccggagtcgtttccgcttgaaagcccttcacgggaaagacctgttcgaacaagaagtgatggcgttgtaaaataaaaattcccggcagtgagaaattcttttcgtactaccgggaattcttgtcaaggctgaaagcttgtagccaataaaagtccatgagccggaacagacaccgttccttccaactctctgccagtcatataatcatattttatcccgtctggcaagagaagcggtccggtttccttatctccaaagttaccaaccacatacattacctcagccccattcttcaatgtcaggctacgaggagtagtactccagtagttctccgttacattccatgaaaatatcgcatcattctgaaacaagtccttatgcgttacccgtaagttcagtaaccttgcatacacatcatataaaccttttctttccggttccgtataatattcccaatgtaaaggtttcttttccattttattgtcttctgttccccgcgtcacatcatagcccagttctccaaactgccagatcattttcggccccggcacagtaaagcaaaaagctgcattgacagccaactgactcatccggacagacaaattcttcgcaattgctccatttccataggttaacgccttataggccacccgttctacatcatgactttccatgaaacccacataacctccgtacttcattgaattagttccggtgtaaagacagctgaaatcactgtattccttccatcccattcccgactgacaataagcattattggcatcccgccacaacttcattccatatccggccagctccttttcctcttcatcacaacaaaaatgttccagaatcactacagcctctggtttaacagaagccacaacatcataatactctttcaggattctgatacgtccggcatcataatcagccaccgtagcctcagtacattccctttgtgtcaatcctttagtaaggtcaaaacgaaaaccgtcaatatggtattcgtccagaaggaactccagattccgcttgacaaacgaccttaccagctccgattcatgattaaaatcatggaacacgctataaggatgaggagcatccacattaaaccatgggttgttttccgctgtcttattatctgtccggttccagtagagtttagcaaatggcatgcttcccgtggcatgattatatacaacatcaaagatcacagccaatcctctggcatgacattcatcaataaacctcttatacatattttttgtcccatacgctttatccagagcaaaatagaaacaaggattgtatccccaactgtcattcccatcaaattcctgtacaggcataagttcaatggcattcacccctaacgacttgagataatcaagtttacctaaagcgccactaatatcagatgtctccgtaaagtcccttaaaagcaactcatagataatcagattatccttatctttcagactaaattcattcctccacgaataaggttcttgattaatcttgaaggcagaaacaatacctcttcccccctccggatagactctttcagaagacggatatactgattcgggaatatacttgtcattatcggggtcgagaattttctctgaataagcgtctgctatacggataatctctccatcccgcatgcccgtataatactgaaagcgatattccttatcagaatcaagacctgtcagtgtaatccaccagcacccattcgcattatccctatacatttgggaagtttcatcattggctggtgtccaatcattgaaatctcccacaatgtgcgcaaaatccttatgcttaccattcttatctttgtcataaaacgcaaaagtaacgctgtaatctgcattgacattgatgccctctctggttcctgccggcatggccttctcctttatgggcgcaggctgaaacatatgatacttgttgtccgttacctttatataaaagtccgtatccgttcccttcttggttccgtcttcattgcgtatcacaattccaagctcattgacaggcgtttcccccgaagcaaaccattcacgtatggaaggagacaacgaaattgaccagcaattgttgccttccgatgtcattttgcatttatcaatattttcattccattcggcaggtacgaacaaccatgcctcctcgttcacaattccaatatgcaggtatacatcccctttatatccgtaaaggtcagacgacttcgcggctttaaaggttatagtcagaggctgatctgcatcaggccgctcagaagaaaaacttaatccttcgggcacatctaccggagcagtttgcgctacactttctgtatccgaacaagacagcccccaaaagacacaagaaaaaagcaataaatatataacttgaattttcataagtaccagtattaacaatatggaacaaaaaggggtatacctgaaaaattctcctggcacaccccttaaagttcactaattctgtttattgagcaatcatttcataactgtaatcgggagttgaaagatccactacaatctgataggttccggcagaaactgcaatattgccagctccggcagccaatttgccttcttcttcaccagctccgaaatcaccattgggcacattccattcatcattggcacgaaatttaatctcgccatccgtcaatgtgatagtaactttcagtttcaaatcagtctcatcgtataccaaatcggtatcttcatcccactgtccgggagttgcactgcctatgacaccaaagttcacgacgtctgcactccaggttaaatcattgatattacactttacataataataccccggttcacttacagttaagttattcaatccgtcacctacagtcattgaaccagccggagtgtcatctcccactccataagctccgtcccaactggcattaggacaaatcttgaattgactgttcaggtgcacatatccggcatagtcacccgccatttctccctcatcattcttaacaggatacagtttcccaatcacctcagcctcgggattccatccctgctggtcaccggcaattctaagttctgcaggtccttccaagggtgcctctggctctggttcataaggaataatgcgccagttttcattgtcctgacaacttacggtcaacaagcaaaaaagaagtgccgtcaatatataattaaaattcttcttcatgattcttaaaactaaaagttagacaatatttttatttagcatagcccggattctgagtcagattcttgttcacagccagtgtgttggcatgaatcgggaatacctgcaggtacttttcagttttcgggcgataggtaatggcatcattgaagcgtccgaaacgaaccagatcctgacgtctccatccttcccatgccagctcgagcaaacgctctttcaacaaattatcaagagtagcttctgcaaaagatgcaccgacgcggttacgtacttcatccagatcagcttgcccgctctgtccgttgcgtaccagagcttctgcacgcatcaatactacatcggagtaacggaataaaacccagtcattatgcggacattgaccgtcttcggtagctgtggcatcatcagcatatttatacatacgtgctcccgctgtcttcatgtttgtatctcctttgtcaaactgaagcttaaccgccataggcttatactccaaaggttctcccgtatcgctgttgattacttcttcaccattcacaatcaccttgccagtataataagtcagttccaggcgtggatcaggattagcacttccatatccaaacgcattcatcgcttcaatagtggcagtcgatccgttccatcctccattaccaaatcctaatgccttacccacgtcataatgccgtgaacgtaccagatacatattgcgggccttatacaatgaggggtccattgggattacaaaaatattttcttttgatccttcattattgaccacaaaatttgacaagaatccgttcgtacctaaattcaacgcatagccacaagctttcactttatcgcaataagctacagtagcctcccaacaattcatttcttgaccatccaccgtaaacttaatattctttccatccggacgaacattgtctgtccagtcattgtcggtgtaaacctccgcattcaaagccaacttagccataaggaaataagcagcagctttcgtcatacgtccgtaaaactctccattttccgcactcttggcatcttccagcagtggaatagattcttccagttccttttttacaaagttgaacacatcagttctttctgactgttttacatctgccatctgagtaagtgaagattccactataggtacacgtgcaaacatatccagcaagtaataataatacatggcacgaatggcacgcacttctgaacggtaaatttcgtaatattcgttctccgggtcttgttctttcaagctaaccagcttatcgatagactgattacattgcacgattacaccatataaataatcccatgttccgataatcaggtcattattcgtaccccagttatgcgtaaaaaggtttctccacaatccgccgtcatcccagtcaccgccacgagttggcaagatagcctcatcagctgtaaaagtattcaaatcatacaatccgcggtcagttccagctaatccagcacctcctccatctgctccaatcttggtataaagattagctactgtattcaaataaatcatttgcggattcttgtatgcctcttcttccggcatttgatctacaggattctcttccaaaaatgacgagcatccgctcatactcattgccgtagcaataataaaagtatataatatgttacgtttcataatattttcgagttaaaagttaagactaagacccaatgaataagtacgtgtaagcggatagaaccgtttgtcatctatacccagatcactacccacagtagcactattgatcatcggcgacaaacctgagtaattggtaatggttgccacgttatttacagagaaagtaattcgtaatgcattgatgttcttcaggtttttggtattcaagttccatcccaaagtgatataatcaatgtgcacataatcacctctctccagccagtaatcagttacagtctggtcatgaatattcttttccggagctccttccataacattgtaagtcgggaacagactcatattcatgtatgacaatgaagtaccattgtaaattttatgtccaaaagcaccgctgaactgtgtctgaatgtcaaactgtttatagcgaaaattaatgttacctcccagatagaacttcggcatagcctgaccagcgatgtaacggtcttttccgtcagagcgatctacaccttcttctccatcaatatcaagaatatgatatgtgtgctcaccgtttcctttcatatctatcaaaccgtcacatttaggaagatagaacactcctaccggttgtccaaccatctggtagataatctgattgttaccaccgataaaccctgcaccattcattccacccagattcatatattctttagcactcaatgattgtcccatgtaagttccatccagtgaaagcagtttgttcttctgccaggagaaattagcagaaatggtcagctccatatcttttgttctcaaaggtactccagttatggctacttccacaccactgttttccatttcacccaagttagccaacaacgtactgaatgcaaatggaggcacaggaacagcataattgtaaagcaaatcactggtctttgagtagtaataatccactgaaccacttaaacggtcatcaaagaatccccagtcaagtccgacatcgaacattcgttttacctcccatttaagatccggattttcattacggttaataccgtatgtcactacaggttttccgttgatagtcgtcacaccagtcgggctcatcagtttcaacgaattataggcaccaatagcgtcctgattaccagtcaaaccatatcctgcacgcagtttcaaattggtcaggaaatccacgttcttcaagaaagcttcttctttcagcacccatgcaagagaggcagaaggaaagaatccccatttattgtttgcacccagtttagaagaaccgtctgcacgcatattgacagtggcaatatacttgtctgcataactgtaattgaaacgtcccatgaatgaggcgatagaataatcgttagaataagaacttacatctccatatttcacttccgctcctgcacccaggttattgaacccaaagaagttcgtaccaaactgcttagcttgtgcaccgaaacctgtatatctataatcctgaagttcggccaaccctaaaacatcaatgaaatgacttccaaatgctttcttatagtttgcggtaaaatttcctaacaagacaccactcttgttatcatttttactacctaacccattcgttccgataccagccttgatattagtcggaatatatactgaattttcttttacattatacgtatatgaaccaaatgcgctcagtttcaaaccatcaattacagtccatgtcaaacgggcatttgcattaatgtaactattagattctacatccttgatagtcaatcttcccaatggattctgtgtttcattagcacttggatcttcaggccatgtgccatcctcattaggaaaatcaggaaaagtaggattgaatgacgctgccgaatagaatgttttctggtaatcgttcagataacgtttgtctacttttgaagcaaacataccaaaatcaatcttcagtttattattgaacatagtttgagaagcatccagtttggcagtgtaattgcgcatatagttatccttaataatacccttctgatcaatcacaccgatagaagcacggtagtttgaagattccgttccacctccgaaagagatacgatgattctgagtataccctgtttgctgcatggcttcaatgaaattggtattatatcccatatccatggcattagcatagccgcggtcggctactacctgacgatatgctgaagcatctaacatgctcaagtttttatacactgtttctacaccaaaacttccatcgtaactcaacgattttgttccgttcttgcctttgattgtagttaccacaatcacaccacttgcaccacgtgaaccatactgtgccgtttcagatgcatcctttaatattgtaaagctttcaatatcagctggtgaaatagcattcagcatattcaggtcgccaaacacaccgtcaacaataaccagcgggtcattacccccagacaaagaagtagtaccacgcacacggattgaagcagaagctgttgggtcaccacctgttttctggatatttaccccggccaccttacctttgatagcttgtaacgggttagttacgacgccaacgttcatgtcttcacgtccaacccgttgaatagctccagaaaccgtacgctgactacctgtagcataaccaataacaattacatcatccagaatttcagcatcctcaactaaagttattttcatatcagatgccgctggcaattcctggttacgaaaaccgatatatgaaataaccaaaatatcgcctttttttgcatccagcgcaaaattaccattaaaatccgtaatggtaccgttagtagtacctttcactaaaacattggcgccaataatagcctcccctgttttatctttcacactacctttgactattatagcctgtgctacacctttcacagccatcagcattcctactaaacacaatagcagaatcctgaccttccgatttaagattttttccatttgataaattattagaatgttaataatagcctaaaaaatacctattgaaaaccactacaatcgttaccctattacaatcctgttcagttacttaatttctttaattgagatggcatatccacctcccacagcggccttcagattcaacttcgttttgttcgttactttcttcttagtgatagtataagcctgcggattcttatcccagcttgcacctttggcatctgcataaatcacggcttcatatttctttcccggttccaggaaatcaagagccagcttcgattcatgaccgttatatcctgccgtacatcctacgtaccagttagtagtacctttggcacgacgggcaatcgtcacatactcacccggttctgcttccagatacttcgtttcatcccagtcgacagccacatccttaatgaactggaacgcgtccatgaaacgttcataattttccggtacatcggcagccatctgcaacgggctgtacatcgtgacataaagtgccagctgacgtgccagggtagtacgtgcatgcgatttgttattcggattcatcttgctgcagtccggttcaaaaataccaggagtataatccatcggaccaccaatcaaacgtgtaaacggaagaatagtcgtatggttcacattatttccgccaaacgattcgtattctgtaccacgtgctgactcattaccaatcaggttcggataagtacgacacaatccagtcgggcgaacagcttcatgcgcatttaccataatcttataatcagcagctttcttcacagcatacagatagtggtttaccatccactgtccatagtgatgttcaccacgaggaatgatgtcacccacataaccactcttcactgaattatacccattgtccaccataaactgataagctttatccaaatgacgttcgtaattacggacagaagccgaagtttcatgatgcatcatcatttcaatacctttacttgctgcataacgatgaatttcctgcacatcaaagtctggataaggagtcacaaaatcaaacacatagtctttgctcttgccaaaccagtcttcccaaccctggttccatccttctacgagtaccgcattaaaaccatgttttgccgcaaaatcgatgtaacgtttcacattggctgtattggctgagtgcttaccattcggctttgtctgtgaataatcagtcaccccaagcttcacactgggcaactcatcagtataagcccaagttcctttgttggtaatcatatcccaccatacacccacatattttaccggatgaatccaggaagtatcctcaattttacatggttcattcaggttcagcgtaatacgtgaagccaagatattacgtgcatcgtcactcacgattacggtacgccaaggcgagttgcaaggagtttgcatataacctttatctccctttgcatccggcgtcagccatgattcaaataccatattcttatcatccagattcaggctcatacaagcatagtctaccaaagctgcttcatgcagattgatataaaggccatcatccgtcttcatcatcaaagctgtctgtactcccgtaggtgagaacacaaactgtgaagaattttccgtcaccgccgttttcattttctcacgaatctcagaaagacgggaagttgtatagtcatattcctgcgtgtcataatctcccggaatccagaatgccgtatggtcaccggtcatagcaaactgagtatgttcttccttaatgacgaaataattcaaattaggttgctgagggaactcatagcggaaacccagtccgtcgttgaacaagcggaaacgaatcacgatgtaacggtcattttccggctgatcaagtgtcacttccagttcattgtaatgattgcgtatttcactttcttcaccccataccggacgccaagtttcatcaaaagtagaagtatgcgtttctctgactttaaaaccagtcatcagattcattttctcatctacccgttctttatctttgcgttctgtccattcaaagccaatccgcttttccggatcttcccgttttaattccagtcccaatgtactgggttttatcacaggcttgttcttaaaagttaactcataaacaggagcacctttttgattcaagctaaagtccattaccagattcccatccggtgaagtcaatttctgtgcattcgcccacaatgcacaacaacacaaagctacaaaggcaaaagtttttcttgttttcataagttcttcgtggtattaatattgattagattttatgtttttcaattatcgagagcaaaattatgcgtcactttttcatcttattttcacaaaaaggaaaatataaatcagcataaatggtaatcatcttataataagccgattaatcagttttacatagcctaaaaatagaaacgttttagaagtttagaatgagattttctcttccatccaaacaaagtttcccgcttaaattcacattttttccggtcaatacgtcgagtgcattttctcgtggaaggatttcctggtaaggagccaggtccagttcttttgagtcatccgttccgttcatgataattaccaccgatttaccgttaaactcacgctgatacacatacactccgttttgaatagaataatgtttcaggcttcctttacctatcacctgattcccttttctccaattcagcaattgacgggtaaactcaaatgcttcgttttccaatgccgtccgcccattctttgcaaagcagttgcgcgtatctccttgccagcctcctggaaaatccttacgcaaatctccatcacccttgcctttatcaccggtcatcagtatttccgtaccataataaatctgcggaatgcctctggtagtgagcagaaagaccatagcctgcttataacgtttcaggttcttcgccatttcatcggtctgtgcaaagcgggaagtatcatgattatctaaaaaagtcagcagattcatcggattggcatataccaaatcctgtgtctgataatcataaagcttatataatcctcctccccactcaccggtttcttcatcaaatgcctgatttatcaaagcctgtaaaggaaaatccatcactgtaggcaagttagaattcagcggcgcagccagtttactgtccttctgccaataggaaaccagcacattactattcaaccaggtttctcctacaatattgaaataaggatattcatccaacacctctttacaccactgactcataaaatcaaaatccgcatagggatgtgtatcctgtcggataccgttaatgccagcatactcaatccaccagatactgctttgtatcagataacgaaccacatggcggttacgttggttaaaatcaggcattacagaagtaaaccacccgtcagtggcaatcttcttttcgaatgcactggcgtgaatatccattacactggccgttttaaatgaagtttgcacgtaattggaatggtaattaaaccattctttggaaggtttgtctttaaacaggtaattttcgcttccgcaatgattaaaaatcatatccatcactacttccagattcttttcatgcgctttctctaccagtgcacagaaatcttcattacttccaaaccgtctgtcaatctgataatagtctgtaatggcatatccatgataggaaccgctttccatatcattttcctgagtaggattcagccagattgctgtcactcctaaatcagcaatataatccaaatgactcgatataccttgaatatcaccaccatgacgtgcaaacgcatcagcacggtctaccttcttttcacgcatcccgtctaccacgtcattttcaggattaccgttggcgaaacgatcgggcataatcaggtaaagcacatcttctgaagtaaaaccttttacatcttctcctctccgcacacgcgatttcagttcgtatggaatctgcaatttcttttttccgtttttcaacaggatttgaaaagtctgtgcctttgcttccgataaatcaaggtagagcaacaaataattcggattgtcctgcctaactgtttctttcagaaaaattccttcgccggatacactcacatccgacaaagccaaattctctccatacaacaaaatctggagttctggatttttcattcctgcccaccagaaagaaggagccactttctttatctccattgcctgagcagcctgtcctcctccccacgagaaaaggaacacaatcaataaaattaatgcatgtttcatgatattgaggttgaaatgtttttcaacgcaaaagtagattcatgataaaagatttcttatctttggaaataaaatataaatacataaaagaagtaaacagaaggtttacaagaagttaacaaaatttgaagcaactaaaatataaatgatataacatcagatattcaaccttaaaactatgagatctatacttttccttatattgtttattgcagaaggctggttcatctccatttccgcacaagactccgagcaacgaatcttagagcaattagataaagcaatttcccaaaaagagaaatttaaaaacgacagagaagctgtcatatctcaaatcaaacaacgactgaactatgccacagacaataccgagcgttataaactctgtggagaactatttaatttgtatctacattatcaggctgactctgcctgccactatattcgtcgtaaagaatactacaactctctccagcctcaaccggagagagacatcgaaatctctatcaatcgggcagaagtaagaggtgtcatgggcatgtacaatgaggccttgacagaattacaaacaattcaccctcatgagctgtcttcccccaacttagaatattattatttcaccataagagcctgttatggatggatggcagataatacagtagacctacacgtaaaacaaacgtatctgaaaaagacggaactgtatcgtgactccctgttgaaaatacttcctcaaggaagcaaccgtaacattgtattggcagaaaaaatgatattaagcgggcaggcagaccaggctattcccattttgaacaaagtgcttacttctcctttagacatacaggaaaaagcatacgcatactataccctttcattggcatacgaagccaagaaagacacagacatggaaatctattaccttgctcagacagccctcattgacctcaatgcatcggttcgcgaatacgcggcccttcaaaagcttgctcgcctggtgtaccagcaaggcgccccggaaagagcttataattatgtaagctgttccatgaaagacgctgtagcctgcaatgcacgcctgcgttttttagaagtcacagaattctatcccatcatcgataaggcttattccgacaaaaaggcgcaagaaaaacggttaggaagaatcctgactcttagcattaccggattggctgtatatctcatcctactggccttttacctataccatggactgagaaaactttctctcatgcgaaagaatctctcaaaaagcaacaaagaactggtagctctcaaccagcaattgcagcagactggaaaaatcaaagaagtgtacatcgcccgttatctggaccgttgtgtcagctacctggacaaactggaacaatacagacgctcacttgagaaattagcgatggcttcccgcatagaagatttgtttaaagctatccgttcggcagactttctgcgtgaagaacgtaaaaacttttataacgagtttgataaatcgtttttggaactattccccaacttcatccatgatttcaacaacctgttgaatgaagatggaaaaattgagcccaaacctggagaaatcttaaacactgagttacgtattttcgccttgattcgcctgggagtgaccgacgccaaccgaattgcccatttcttgggatactcattagctacggtatataactatagaagtaaaatacgtaacagggctaaaggtgacaaggataactttgaacaggaggtgatgagattataacaacattatttcttccgatttccctaccaaattcttgcttttccccttgaatataattaccttcacctaagagaattctctgtttcacactgtgggatacaaaaaccacagtgtgggatacatatttcacactgtgaaatacaaatcccgcactgtgaaacagagaatgcttcagcgcatttaaaagaattgttctaaccctttaaatttattgattcaaatggcagctacttacaccatgcaggaaatgaaagacctgcacaacgaaaacgagaccatcctctatccaagaatgattatcaagggacaatgttctacagaggagctgattgaagacatcgcacatcacaccacctacaacaccggagagctccggggcatgattatggccctgaaagatgccatggcccgcgaaatgagccggggatattcggtcaagctcgatgaaatcggcacatttactccttcgttaggaataacggaaggaaaagaggccgaacaacccgcaggagaaacccgtcgcaatgccagaagcatcaaaatacgcaacatcaacttccgtgccgacaaagaactgattcgcaagacggaagggcactgcacgctggaaagagaaagcggtaccagcaagctgaaaacttcacaccactccagcgaaaagagattgaaaatggccctggattttctgaccacacacccgtacatgacggtggcggattacatggccctcaccggcttgagccatactaccgcagccagggaacttcagaagtggggaacaacaccagaaacaggcatactccccaaggggcagcgcacacacagagtctatgtggccgtcaccgctaaagaaaaaggctgatggctacatgataaagcagcagataaagagtttttttgtacctttgcaaaaccaactttcttcacatgaaaaaattatctattttattcacattgatggcctgctgcctgatggcatgcacgggcggtcagaaaaagacaaccaatatggaaactggaaacgaaacacttgtacgtctggaaacgaccatgggaaacatcacggtcaaactgtataatgaaactcccaagcatcgggacaattttatcaaactggcgaaagagggtacttatgacagtacgctcttccaccgcgtaatcaagaatttcatgattcaggcaggcgacccgcagagcaagactgctaccgataccactacattggggaacggagatgtaggttacacactgccggctgagttcaacccgaaattcttccacaagaaaggtgcactggctgctgcccgcttgggtgacgaagtaaacccgaacaaggaatcttccggctgtcagttctacattgtgaccggacgtaaattctctgaagcacagatgatcagcatggagaaccagttgaatgaggcacgtttggaaacggtgttcaacgaactggcccgcaagcacatgaaagaaatctacaagatgcgcaaagccggcgacaacgacggcctgttggaattgcaggacagtctggaagcccaggcacgtggcatcgtagccaaggaaccggccctgaagttcagccgtgaacagattgcagcctatactaccgtaggaggtgcgcctcacctggacggagcgtataccgtattcggagaggtgacagaaggtatggaagttatcgacaagattcaggctgtaaagaccaaccgcgccgaccgtccggaaacagacgtacgcattctgaaagcaaccgtgattgaataatctgatttccgcatgattcaagtaaaccgttatacactggctaacgggctgcggattgtacacaatgaggacgactctacacaaatggtcgccctcaacttgttgtacgacgtgggagcccgcgatgaagacccgtcgcacacgggatttgcccatctgttcgagcacctgatgttcggaggttccctccacatccccgactacgacactcccgtgcagaatgccggaggagagaacaatgcctggaccaacaacgacattacaaattattacatcaccctgccgcaccagaacgtggaaacgggattctggctggaaagcgaccgcatgttcagtctggatttcagcccgaagagtctggaggtgcagcgccaggtggtgattgaggaattcaagcagcgcaacctgaaccagccctacggggatgcgtcgcatctgctgcgtgaactggcatacgaatcgcatccgtaccgctggccgaccatcgggaaggaaatcgcacacatcgctcaggctacactggaggaagtgaaagactttttctaccgtttttatgcaccgaacaatgccattctggccgtaacgggacatatctcattcgaagaaacaatccggctggcagagaaatggttcggccccattccagcacggaacatttccccccgacagcttccgactgaaaagccccagacggctgtacgccgcaagacggtggaacggaaagtaccggtagatgccatctacatggctttccacatgtccaaccgcatgcatccggattattacgtatacgacatgattactgacattctgtcgaacggtcgttcttcacggttcatccagtcgctggtgcaggaacagaagttgtttacttccatcgatgcctatatttcaggcagcctggatgaaggactgcttcatatcaccggtaaaccggtagaaggtgtttctctggaacaggcagaagaggccatctggaaggaattagagaaaatgaagaccgtaccggtaagcgaacaggaactggagaaggtaaagaaccgctacgagagcgaacagattttcaacaacatcaactacctgaacgtagcaaccaatctagctttctttgaactgacgggaaaagcagaagacatcaacgaggaggtaggaaaataccgtgccgtaactgccgaacagattcaggcgacttcgacccgttgcttcgttcccgaaaattgcagcatactctactataaggctatttcatgagacattcaaattaccgtgcactcctctggctgggcattcccatcgtcatcggacagattggagtcatcatcttaggctttgccgacacattgatgattgggcatcacagtacgcatgaactggcggcagccagctttgtgaacaacatgttcaatttagcgattattttcagtacgggtttcagctatggtctgacccctatcgtgggcagtctgttcggacaaaaccgttgtgaagaagttggacgtaccctgaaaaacagtctggcagccaatacgctgctggccgcaatcgtgtgtctggtcatggcggtgctttattggaacatcgataaattagggcagccggaagaactgcttcccgccatgcgaccgtattacctcgtattgctggcttcacttcctttcgtgctgtggttcaacggtttcaagcaatttactgacggaattaccgacacacgtatctccatgtggattctgttagggggtaacgtgctgaacatcataggaaactatcttctgatttacggaaaggccggatttccggagctgggactgctgggtgcaggcatcgccaccctggcctcacgcatcctgatggtcattgcctacgtgatactctttttctgtacctcgcgctacgacgtgttcagaaaagggttcgccaaaggacgcctcaacaggtccgatttcgggttattgaacaagctgggatggcccattgccggccagatgggaatggagacggcttcgttcagcctcagcgccatcatggtgggatggctgggaagtacggcgcttgcctcctaccaaatcatgatagccgtgtcgcaagtctgcttcatgatgtactacggcatggggtcggccgtatcggtacgcatcagctatttcttcggccaaaaggacctggagcatgtgcgccatacggccagaagcggcttccacatcatcttggccatgattgtgctcacgggcattcctatcttcctgcttcgccactacatcggcggctggtttaccaatgacgaggccgtaagcctgatggtggcacagctcatcatccctttcctgctgtatcagtttggcgacggactgcaaatcaatttcgccaacgccctgcggggaatcgccgacgtacgtcccatgatgctgttctcgttcatcgcctatttcctgatttccttacctgcaggctatctcttcggatttgtctgtggctggggagccatcggtatttgggcagcctttcctttcggacttaccagtgccggaatcatgtattacctgcgattcagatataaaacgaaatctatccgctaaaccatgttctccacttctttcaaaatcgttatcggctacatattgctggtggggcttctgataggagcttttacttataccatgcagcagatgaacctgctgactactcctaccagcctgagagaccagctcgaccaccggcgccacatcactcaccgtatcatcagccagctgtatgacgcggaaagtatcgggcagacactccgcaccggaaatctgaacgagtattatcactacctgaaggcgatgaaagaagtgaacgcttcgattgatacactggaaacgattctgacggacaccctgcagcaagcccgtctggacaccgtaaggaccttgttgcagaacaagcaatggaacatgtatgcggtgctggaagccatgcggaatacaccgaccgaccagatttatcaggagcagcttgacagcctgatagctcagcaggattctttgctcagtacgccgcatatacgcagaaaagtcattacgcaccataactcctacaccatccatcacaaaaagaaaggattcttcaaaaggctggctgacgtattcgcacccgggaaagaagattccacccaggtgagcaacgtgattcaggaggaatacacggatacactggatgaagtgtacagtccgatagataccatcagcagcatgattacaggtattcagcacaaggtatttcagacccgccaaaaggaaaccgagatgctgaacactcgcatcagcagcctgcgcgtcattggaagcggactgagccagcgtgtcaaccagttgctggaaaacattgaacacgatgaacaggaagccgcccgcaccaaactgatgcaggaggaagagatacggaaagaagctgctgaaaccatggccaagattgccattgccgcctttgtgctggtactggtattctccattgtcattgcacgcgacatcactcgcaacaaccattaccgacgggaactggaaaaagcgaagtcgtatgccgagaacttgctgatagcccgtgaaaagttgatgctgaccatcacccatgacatcaaggcccccgccggctccatcatcggctacatcgacctgctcatccgcctggtgaacgaccggcgacagcagttttatttatcgaacatgaaaagttcggcacaacatctgctggcactcgtcacttccctgctggattaccaccgcctggaagcaggtaagatggacttacatccggtagctttcaatccgcacgaattgctgacagatatttataacagtttcctgcccttagcagaaaagaagcaactgcaactggatttcaaggaaaaacttccggaaactctcaccctggaaggagacccgttccgcatacgccagattgtggagaacctgctatcgaatgccctgaaatttacagctgcaggaggtattaccctacaggcagaataccacggcaatcagttcgtgttcagcatatccgataccggatgcggcatgacagccagtgagcaggaacgcatattcaaagagttcacccgcctgagcagtgcacaaggacaggaaggattcggactgggattgtccatcactcgcaaactggtagaacttctgttaggaagaatagacatcgaaagtgctcccggaaaaggtagtacgttcaaggtatccatgcctttaccttccatttcacccaaaccagctcccgacacaaaggaaccggccattactcttcctaaaatccatctgcgaattgccatcatcgatgacgaccggatacaaatgcatttgacggaagccatgctgcataatgcggaagaagaagtgaaagacctcaaagtagaaacggtatgctgtgaacagccggaagagcttatcgaacagctcaagagccgtacgttcgatctggtattcacggatattcaaatgcctgccatgaacggatttgaactgcttcatcaccttcgcagccaggattttgcccaggcccagtctattccggtcattgccatcacagcccgaggggatatgaatgagaatgacttcctgcagaaagggtttgccggcatgttgcagaaacctttcaaccagtcggaactgaagaaggtggtaaaaaatgcactgacccacctcaccgtatcggacaatattcctgacaccttgccagttcagaaggaaacccacgaaacttcgccacacacagaccagccttataacttttctccgctgacggctttctcggaggatgacccggaagctgccaaagagattctgcgcacctttgcacaggaaacacagaaaaatatggagaagttacagactgccatcagtaacaaagatatggaagccttgtgtgccaccgcccacaaaatgctgcctaccttcctgatgattgaagcacaaaaggccattcctctgttgaaatggctggagcagcaacgcggcacacagacctataccccggaagcagaacaagcggcagaaaccgtgattgcagaaacaaagcaggtgcttgcatgcaaaatattaaaggacatagaaggggtatcgtaaaaaatagtatctttgtaaaatcaattaaacaaaaaatcacatggttccgtctattttaatcgttgaggatgatttgactttttctaccatgctaaagacatggctggggaaaaaggggttcgaagtggagactgcaagtacgcaggctaaagcacgcaagcaaattggcacgcgcgacttcgaccttatcttgtctgatttgcgtcttcccgaccaggacggactaagcttgttgtcatggcttcgtgaacaggggaatcaggtgcctttcatcatcatgaccagctatgcggaaattcaaagtgccgtacgtgccatgaaggaaggagccactgattatatttcgaaaccggtacaacctgacgaattactgaaaaaaatcaaagaggctattcatcaggagaaaactcctgcagaaagcggaaaagaaaaaaacgctgcacaaacagctcatggttttctggaaggagaaagtgaagaggcccggaaattatacaactacgtaggactggtagctcctacacaaatgtcagtactgattaacggagccagtggaaccggaaaagaatatgtggctcatcgcattcatcagttgagcaaacgttcggaaaagcccttcatcgccattgactgcggttccatacctaaggacctggcggcttctgaattctttggtcatgtgaaaggctcatttaccggtgccttgaatgacaaggccggtgcatttgaagaggccaatggaggtacattatttttggatgaaatcggaaacctcagctacgaagtgcaggtacaattgttgcgtgctttgcaagaacgtcgtatccgccgaattggctctacaaaagaaattgaggtggatgttcgtcttatcagcgccacaaacgaaaatctgaaagaggccattgcaaaagggaatttccgggaagatttatatcaccgtatcaatgaatttacgctacagatgccttccttgaaagagcgtccggaagacattctgctgtttgccaacttctttctggaccaggccaaccatgagctggaacgtacattgataggattcgatgcagaagccagcgaagccatgcagaaatatccatggccgggcaacctgcgccagctgaagaatgtggtcaaacgggctaccttgctggctcaaggtgaatttatcacggctaaagatttaggagaagaaataaacgagcggaaaacggtgtgcgaaaatccggaaatggaggaaactttcgccctgcacgacgaggaaaccgaaaagcaccggattttaaaagccctgcagcaaaccggaaataacaagaccaaagcggctacattattgggtattgaccggaaaacattatacaataaattaaaactctaccacattccacaataaacgtgtggaatttttccacacgttccacaattattccacagcgttctgtataaaaatcccttctataaggcattctacgagtttggcacgggttttgtctgtttatttacagataaacaaagacaatgaacaaccaaaacaaactaggctaaacccaaccccatagaataaagttcagagattgtttacctcatttaattgaattctcaattatatacaatctcagataaaatgaagatgcctatgtgttaaaagaaggggacgctgtgaagcgtttccttcttatcttttttattccataccgaaaccattccacagattgcctgcaggaagaggggctaccaaatctatcggctctttggataccggatgaataaagcgtaccctgcgggcatgcaagcagatacttccatccggattggagcgtggaaaaccgtatttcaaatcgcctttaatagggcatcccatctttgccagctgacagcgtatctgatgatggcgtccggtcttcaaatctacttccaacagaaaatagttttctgaatgacctatcaaacgataattcagtacagccttcttggagtttttcacttccttatcgtaggcgtacgacttattctgcttttcgtttctgaccagatagtgcaccagttctccttctgcctccttaggctgttgtttcacaatggcccaatacgttttctttacttcaccattacggaacatctcgttcagacggctcaatgccttactggtcttggcaaataccaccagtccgcttaccggacggtccagtcggtgagtgactcccaaaaacacgtttcccggtttggcatatttctctttcagatattgcttcacggtctccgacaagggaatatcgccggtcttatcgccctgtactatttctgaagcagtcttgttgactactatgatgtgattatcttcgtaaactactgtcatacacaaaaaaatgaagaacagagaatactgaagaaaactctcccctattccccattcttcactctatactaacattattatattacatgttcataccaccgtcaacctggatgacctgtcctgatacgtatgaagacatgtcagaagccaggaacagagcgatgttggctacatcttccggtgtaccgccacgacgcaaaggaatacgtttgttccattcagccttcacttcgtcagacaacttagctgtcatttctgtaatgatgaagcccggagcaatggcattggcacggataccgcgagaacccaattcctgtgcgatagacttagccagaccaatcataccagccttagaagctgaatagttgcactgtcctgcattaccgtgtacacctactactgaagccatgttgatgatgcttccctgtttctgacgcatcataatcggtgtacatgcatggatgaagttgaaggcagatttcaggttgactgcaatcacagcatcccactgtccttcgctcatacgcatcatcagaccgtcttttgtaatacctgcattgttcaccagaatatcaacagaaccaaagtctttgtgaatctgttctaccacctttgcagtatcttcaaagcttgctgcatttgaagcgtatccttttacttttacgccataagccgcaatttccttttctgtattctggccgttttcatcaataaccaaatccgtaaaggcaatgtttgctccttctgcagcaaacttcaatgcaatggctttaccaataccacgtgcagcaccggtaacaatagccgtctttccagttaataatcccattttctttattttttaattaaacgatatgattattttcttttttcttgcaccctaatgcgccatacacaatcttggctacatagcgccagcccgtttcatcgtccagctcttcgcctatctgaccgcgaatataaggcacttcaattccttttatgcaataatgcaaaatatcagctgtaatctctacattgtcaatatcgaaaagattctgttcctttccttcatgcagtacgcggcgaaacaacgctgtctccttccggtcgaactcctttcgcatggcttctaccctccaaatatcccgaaagaaatcggctctcaacgttccattacggtataccaccatttttatcgcatccagatgagtcataatcagttccagaatctttttatccggagataccggcttgcttgccgccttctccatctgagtggaaagcatctccagttccgactctaccacagccatgtaaatctgttccttactcttaaagtaagtgtacaacgtccgtcttcctttctttgaagcttgggcaatgtcattcatcgtggtatcttccacccccttcttcgcaaaaagttgtcgggcaacgtctaccaacttggctctcgtctttaatactgtcatctttccttattgcacaactgataaaaatctgagcaaaagtactgtttttcttcatactacacaaatataaggtgtcaaattcatctgaaaagcccttacctctctttagattcttcaattatatgacttaaagcctttattattctaaataaaagcaaacctttctatatttttcgcataaacatttgtttatatggatttatctccgtacctttgcaccgcatttaagaaataaatatcgcggagtggagcagttggtagctcgttgggctcataacccaaaggtcgtctgttcgagtcaggcctccgcaactacaaataaaacatcgcggagtggagcagttggtagctcgttgggctcataacccaaaggtcgtctgttcgagtcaggcctccgcaactacgagagaaacttcaggtttctctttttttatgccgtaatataccctaaaaagggtattgcctcccccctcttttccctttacctttgcccaaaagaaaaagaaaataattatggcacaggtaaaaaaacaacttacagaacttatcggacatactcccctactggaacttgaacgtttagaaaaggctcataatacccaagcacgtattatcgccaagttagagtacttcaatcccggcggcagcgtaaaagaccgcatcgcattggccatgattgaagatgcggaaaaaagaggtgtcttgaaagaaggagccactatcattgagcccaccagcggaaataccggcgtaggcctggcatgggtagccagcgtaaaaggctacaaaaccatactcaccatgccggaaaccatgagtatagaacgtcaaaacctactgaaggcgttgggagctcaacttgtcctcaccccaggaagcaaaggaatgagcggagccattgaaaaagccaacgagctgagagacaatacacctggagcggtcatcctgcaacagtttgagaatcccgcaaatcctcgcgcacatgtacataccaccgcacaggaaatatgggaagacatggacggaaaagtagatgtattcatcgccggagtaggcacagggggaacattaagcggagtaggcgaaggtttgaaacagcataatccacaaattgagattatcggtgtagaaccggattcatccgccgttctctcaggcgagaaacccggtatgcacaagatacaaggtatcggagccggatttatccccaaaacattcaaccgcaatgtagtagacagaatcatccgcgtaaccgacgatgacgccatccgcacaggaagagaactttctctcaaagaagggctgttaacgggtatttccgcaggagcagccacctatgctgccctgcaagtagcttcacaaccagaatatgccggaaagaatatcgtagtactgcttcctgacaccggtgaacggtatttatctacagcactattcgcttttgaagaataccctctttaacaaaatcaaatacaatattctaccgtattgacaattcccgcacggagcgcataacgaatcgcttcgtgcgcattgtttacttccagtttccggaaaatattcttacgatgggtcgccaccgtatatacactcaaaaaacgctctgctgcaatctcttttgtactcttccccagcgccatagctcgtagaatttctttctccgtttgcgtcagtggagccattctattttgcttctttccttcctcacgaagcaaatccttcgccttaccacaaacaaactgacaccctccattcacatcacgcagacattgatttacttccgccaacggcgcatccttcatcaacacatgaaatgacgagcccgcaagcagcattctacgcacaaaatcacgtcccagctgatcactaaacaatacaaagtcagccttcggaaaacgctcatgcaataccagcagctgttccaccgaacaatcaagcaaagtataatccagcaccacacatgcttcaggatactcagccaacgattccgccaaggacttccaatccaaagcctccacataaacacataccggatacaatccggcagcaatagccttcatgccatagcgagtcacatcttgattatctgccagaattaatatttgcatataagaaaagtattaaaaaaaagaaagctccgcaaaattgcgaagcttgaagtgggcgttgacggattcgaaccgccgaccctctgcttgtaaggcagatgctctgaaccagctgagctaaacgccccatagggggaaagttgacaattatatttcggtgtgggcgttgacggattcgaaccgccgaccctctgcttgtaaggcagatgctctgaaccagctgagctaaacgcccgaataatc

SEQ ID NO: 3750 - DNA, 132995 bp, Unknown
  gut microbiota DNA sequence
aactgggaatcatggaactacatcgctttttccgttatgctattgagaaaatgtgcaaggaaaagaaaagtttaaatcacttcaatatctgatattaattcaaatctttcttttgttgatgaatgcataaaaatagttcgcatcttcatatcgtgcgcccacagagaaccgctctgaatccgactttacggattacacgatatgaagatgcgaaatgtaggttcataatgggcaatacaaatatacgaaaaaatccccaataaaatgggggactaaattatattttgtatatttacacccaataggcggatgcttaccggatgcttacgaatgctatttttctaattaaacataatacggattatattcattatacgtttatcaaaaaacgtaagtatatttaaaggaaaacgcctaagcgttttgatttaaacgcaagtgcgtttgagttaaaaacacaaggacgtttgaaacgcaaaggcgttttgatatgaatgtacttgcgttttttgaggccttattcgcacgattctatacatcaataaacagatgatctaaaaaaaccatttttattcgttcttagggcttgatattgccgattctgcaaatcataagaacaagggccgaatccatacaagatgggaacggcccccctgagaattcgtttttctaagacaaaactttatttaatcaccaaaatcggcgtgttggaatggaaaatcatccgacgggcaatgctgggattaaacaaacgtgcaaagacgttccgcttgtaatttgacagacacagcacgtcaatgcctttctccttgacatattcgtccaaattgctgagcagactttctccgcccaacatgtcgtaatcaattgtcagctgcggatattgcttcttgaaatattcctggatgcccaccagcttgatttcattccacgtacgcttctgcgcattgtcgctcagatggatgaacgatacttcaaaatgataatccttgaaagtcgttaccagtgagtcgaatgcaatcaagtcgcgctggtcaaagctggtaaagaatgccaccttatggatttcatcgaagtttttcttctgtgcatttttggggatggcatagacaaataccggactacggtcgatgatttcggccgttacactaccgataagatccatttccttctcaccttttccgcgcgttcccataatgattatgagcggcttttcctcgcgggcataatgcaggatttcttcttccggtacaccttcttttagagtgcaagtgtacttcacatcaggaagttctcctttctgaatccgttctttaatactgtttatcagattgttaagttgttcatggatactatcaagcatgctcttgatgcccagttcatgttccatcggcaacccgtagttttctgtcgcatactgcaaactcggcatgtataccggactgaaatacacgtgcatcagcactacttctgcctgtatcttggctgcaaaattgaaaccgaattcacaggcagccatcgaataatcggaaaagtcgaccggtatcagcacctgcttaccatgcttttcttccgttttttcctcattgaccacatcttcggccaaccacgcagaactttcaatgattttcaatgccctgggcagatcactttcgcggatgcgtattctcacgcccgaagaaatgacaggctgaatcaggttgacattatggatgcaagcctcaattccttcattttcaagcacattctttagaatctgggctttagaataagtaagaatggccagtgttacaagtttttcttccatggcttctgcatttttaggttaatatcatattatcgaataaacaataagggccgtaacaggaacggatactctcccactctcttgttacagcccttatcttatatcaagcgcgttgttcttccttcagaatggctattgccttatcgagtaccgtagtatcgtcaagcatcaccagtccgccgtcaggccctggttcgagatggatacctacgctttttccgtccttgaagttatgtccgccaaagaaattacgcaccgtttccacgctgagattcaactcatccgcaatgcgatgcatgcttcccgcgggcaaagaatctttgattttacgaagttcgttaaaggttattgttctgttcatagtagtcataattaagtgttagacaaaatgttgtttttaatatcgatttaaatatagcaaaagattgtgacagcacaaactttccaactgtttttttcgaaaatatcttactttctggtcagaaatgcagaccttttgccactatcattcctccgattatcgcatagagataagtcagtagcagtgtggcatgcagaatggatatgtcatccttggtatatccgcccttggtgtattgggtggagatatactgcggacaatcgaagaatttcttgcgcagacgtgcgtacagcaggtacacaagcacaccgacaaccgatccggccactgccccgcacaaaatatcgccgggataatggacacctaaatacatacgtgagtacgagggaatcattgcccacagaaacatcatgcaggtgaaaggcagatagcgcaccagcaacgaagcaaacatcgctacggcaaaggtattggcggcatggctggagataaatccatacaagcctccccgatagtcgttcaccgtctgcaccaggtacatcagttcagggtcctgagtgggacgaaaacgggcaaaataaggcttgcagagtcccgacgcaaactgatcggccagcgtaacgcacaaagcaaacatcagcgtgatgactattccttgcggcacacggttattcttaaacacgacatacagcaacaccagtacggccggaatccatgtcttagtgtctgtcactgtccacatgaatccatcccagaacaaggagtcgcttccgttaagagaaagtagcaaagccttgtcggcctctatgagttgctgtatgtctgccatttatgcttatctgaattaaatgatttcaattgcttccgtcttcacccagcctttgttgccgtcttccaggcggatttccttccagcctttcatcgaattgtcctcgatgaagactttcgtaccttcatgcaacacaaacaagtcggttccgctttcgttcggcgtactcttgacattgattgtcggctccatcacaatggctcccgtacggtctaccagctccgctttctgttcactggcaaaaatattgctgcacaccgtcacaatcagaaataccaccgctccgatgaatccggttttctttatccaaaggcggttgccgaagatataaaaagagactcctatcagcaaaagaatgaacgagaaaattcccacatagccccagctctgttcgctcatcatgttgaccagcgatttataccatgtcacgatgaacacctcggcagtaggcgtaatcttgtccaccgtcttgctgcgtgccatgcccagattaaagcgaatatccgcatctcccggattcaggagaagggcccgttcgtagttgagcactgccttggccgtattcttcagcttgaagtacgcgtttccaagattataatagatgtcggccgattccccctgcgtctgcaggatttcttcatacaaggacgctgcctcgctgaacttttccttctggtatgcttcgtcagcttccgcttttgtggtagctgccacggcaaactgaatatacccaatcaggcctatcaataataaagataatttcttcatatttagtctgctctcctatccgttttaatgtttgatactgttttccattttactgatgacttccacagaagcggaatataccttgtccatcgcctcgttctcgttgcccggagcataacgtgcatattcacattcgttgagcacaccgatgaactcggcaatcaaggcttcctgcacaccgtagttggtcagttcggcttcaatgttgtctttcgacagctgagataccggaatactgagcttgtcgctgatgtatccccacaaagccttcagcacttcgtcatagaactcattcttcttgttttctgccagcaacttaccagccagtttcatacggcgggtagccaccttgttggctttcttggtcttcaccttcgccacgttggcattttcaagggctttctggcgataaatcactgcaaagacaacgaacagcagcaacggaatcaggtagcacaggtaatatcccacggtgccgaagaaaaagtctcccttcggacgaagtgaagaatcgcccaacttaatgaagcggatatccttacccagcatcttcacgctctccttgttggtgaagtctgaaatcacctgatcggcatttccctgtcctttggcaaccttcaggttgtaagcctctgttttcagggtcttgtagctgttgctcttcaggtcaaagtaggtaaattctattgccggaatcgtaaagttgccggcatgacgcggaatcgccagatattcgaatgtcttcgtacccgtcagtccgctgttggtcagcttataatcatcggtcactttcgggtcatagatttcgaaatcctgcgggaattttacttccggtgtaccgataagcttcatgtttcctgtaccgctcagtgtcagtttaatagtcacagcatcgttggtctttacgtcagtcgcattgatagacgatgccagtttaaactcacccactgctccagagaatccggccggtttggcaggaagcagctgcacgttaatcactactttcggagtcgtaattttcttcttcacttccacgtatcctccgccattgaagaaagcatcaaacgggtcgtccgaaatggtctgctgggcaaccaccccatcaaatgtaatggaagggatttccagtttacccgtctgttgcgggaacagcacatactgactccatacagtcgtattgtagttccgtcctttataatgttccagtgtgaaagtcttctgctgcggcaattctacctcctgcgtatggaaacccttcagatcgggcatcttgccatacaactgacgcagattcaccacggtatataccttataagtcagcagaatggcttcctgctcgtgtacggtggtcttgctggctgtagccgtgataaacaaatcattggctgagatacggctacctgctgcctggctgcgtgaagaagaagcactgcctcctccgttgttgccactattccccgaggtctggtcctgcggaagcaccttgatggaaatggcattggaaaagactttctctccatttacctctacactggctgccggaatggtatacgtaccaggatttcctgccaagaggatataagtgaacgccgtagaactgttcgatgtacgctttccgttgataatctgaatactgctctgctgagagcggctcggtcccatcagcacgtcaaagcccttgatggaaggagcacggaaatccttgatgtcttgcgaattgaccgtgaataccaggcgcacctggtcaccgcttaccaccacgtcggcagcttctgccacaaagcgtaccttgtcggcagctttcacctgccacgccgcaagtatcgtaaaaagtaagaatattatctttcgcattattctgttatttataattattcatttgttcttcattgcttccagccttaccagtctttttccagcttgcgtccctgcacctgaatctgcttcttcaccttatcctgcacgttcttttcgtcctgcatcacggcgttgagcaactgctgggcattttccttcgacatctggttctggttttgctgctgttgctgcggattctgctgctgttctttcttgttctggtcttgctggtccttgttctgctgcttgtcatcctgcttctggtcctgcttgttttgctgctggtcctgattctgctggttctgctgctgatctttcaactgcttctgcgccagtgccaggttgtagcgggtttcattatccttcggattgttgcgcaaggactgcttataggcttcaatacactgcggcaactgtttggacgactgcaaaatgactcccatattgtggtaaatctgtgccagcttcttcttgtccttttccaaacgagacgctgcatcaaactgctccatagcctctttggccttttcctgcatcatcagcgcatttcccagattgtacatggcatcggccgacttgggattcagctccagcgccttccggtagtctacttccgccttgacaaacaaactgtccttgtaaagcttgttgccgcttcgcagataatcacggtctgttttctgtccgtatccggccacggcagtcagggccagacacatacacagaatatatcctttcactttcatctccagtttcatttaaagagtttcacattcttgaagagcggattcttgcggttcagaatcatcaggtcggcagccagcaaaagaatagccagccaggccagcacctggaactgctcgtcgaactccgtaaagacctgtgtctctacatccgccttcgccagtttgtttatttccgcattcagtgccctttcggcattgttggtattgtctacacgcacgtaaataccgtttccggctttagcaatctcctgacacatctgctcgttcagacgggtcactaccacattaccatccttatcgcgacggaattcattggtaccttccaccggaataggtgaaccgtcgggtaaacctactcctaatacaaatacacgcatacccttcttggcagcctcctgagcagcctcgatagctcctccttcgtggttctcaccatcggtaatcagcacgatggcacgtcctaccccttcattcggagtgaaactcttcatagccaggtcgatggcgccgcggatgtccgtaccctgtgtggtaatcaaggaaggagaaatcgtctccagaaacatcttggccgatacatagtcgctcgtaatcgggagctgtgtgaaagcttcacctgcaaacacaatcatggccactttatcgttgttgaaggtctctaccagacgggaaatcagcttcttcgatttttccagacggctaggagtgacatcctgtgccagcatagagtttgaaatatccagtgccaccaccgtttccacaccctgacgcttcaccgtttccatctttgaaccgaactgcggacgagccagcatgaaaataaccatggccagcgcagaaagcgtcagccaaaattttacgtccggacgatatttcgacacatccggcataagatgtgccagcaactccggactaccatattcgcgcaacttcttgcgacggcgatagttcgaataaaaatagaacacagccagcaagggcagcacgatcagtaaatacaaatattgaggttctccaaatcgaaacatgacttcttattttaaggtattttcttcaaaactgtattccgcaaaagaatttcaagcaagatgctcaggaatgcaatcagtgcaaacaccgcataggcttcttcacgtttgctgaattccttcacgttcagtttcgttttttccagtttgtcaatttcacggtacacttccttcagcttcgtattgctggtagcacggaaataatttccattagttgttccggcaatctggctcatggtctgttcgtcgatttccaccggcatctgtacatattgcacaccagcgtacgtctgcatcggataaggtgccgtaccgttagttcctacaccgatggtatacacacggataccaaactgcttggctatttcggccgcagtaagcggagaaatgtctccccgattgttcacaccatccgtcagcaggataactaccttcgacttggccttgctgtctttcagacgactcaccgcgttggccagtcccatacccagtgctgtaccgtcttcaatcattccgcgctgtaccatgtcgcagctcacactttggaacaaattcaacagtactccgtggtctactgtcagcgggcactgcgtaaatgcttctcccgcaaagatagtcagaccgatattatcattcggacgtccgttgataaactctgccgctacctgcttggccgcttcaatacggttcggcttcaaatcttcagccagcatactggtcgacacgtcgaccgccagcatgatgtcaataccttcaatctccgtgttctgccagttatcggtagtttgcgggcgtgccagtaccagcacaatcatcacaaacgtcaggatacgaagcacaaacggcgcatgcagcaaataaatcttccaactgcgcggagcctgcatgtacatccgtgtggtagatacctgcatggtcggttccgtcttcttgcggcgcatcacgtaccacacgatatacggaatcagcagcaagagcagaaacagatattctatattcgcaaaaatcatagtctcaattcattattaaattagaaaaagaggtcgatgatatggcgcacagacaaatacaaagcaatcagtgcggccacacccgtaatggcaatgctgcacagcaaggcaattcgtccctgtttggaacgcttctcctccactttgatttccgtcggctccttcttggcgttcggatcttcctctatcttagtctggttgatgaaatctaccgcattcaccaggttcatgtcgttttcattcatcagcggcgcatatttcgcaaacttcaccaggtcggctgtttcaaacatcaccttcaggtcgtggatagattctttgtccttctcctccaacagacgctcgataatttccgcagacgtcatttccatggcattgaatccgaaacgctcctttatatatatacggatgacatcggtcagttccgtataataagctttcggatcttcacgcttggccaccttgtctgccttgatagtttcaatcttcttcatggcagccaggtgaggcggaagtttaggttctaccttgataatcttgatgataggcttattgtcacgatagcgaatgataaagaaggccgtcaccactcccaaagcaatcagcaacaggatggaatataccatcggtgccaggtcttcccaggtaagaggtacttcctgaatggacttcggaccaaaaaactggtcggggtgcaaggtatccaccggaatggaatacactttcaatgccaaggcctttgaacggtaagccttgtcattgaccagcacctcaaacggcggaagataatacagagccgaatcaaaagaagtcactgtatattcttgtgacaccagccagcgcttgttgtcgttcagcaactgcgtgtcgggcttggccacatccagaatctccactcccctgaccagcgtatcacgcagcaacggcagacgcaatttctggttggcatccatgctgacctgcaatttgattttcgcctgctcaccaatgagcaactgcaaggaatcgatggtagcttccaccgtcacctgctgggctttcaagcccgttgcacagcataaaatcaacacagcacagcaacatgcctttatcatttttgagtagtataataagagatgtctcatgtcaactgtcagtttcgttttgcaaataaattcagcaatgccttcacataatcctgatctgtacgtacagatacagaatccacattgctgtgagtaaatgtgtcattcagcttctgctgtttttccttccaccaggcatgatgtgcattgcgcaatgccttcgacgaagtatcaatccactgctcatgaccggtttccgcatcacgcacgtgcatcagtcccacgtccggaagttcttccatacgacggtcgtacacctgcacagccaccacatcgtgttttcggttggcaatcgtcaatgcattctggaaatcacgttcgtcaataaagtcgctcagcataaaggccgtacagcgtttcttcagcacattcgtcaggtactcaatggcacactgcaaattggtgcgctgactttccggcttaaaatcaagcagttcacgaatgatatacagaatatgcttgcgacccttcttgggagggataaatttctcgatacggtcggaaaagaaaatcacgccgattttatcattgttctgaatggcggaaaaggcgattgtagccgcaatctccgtcaccatttctttcttcagctgctgaatggtaccaaagtccaaactgttggacacgtccaccagcaacatgaccgtaagttcacgttcttcctcaaagactttcacgaatggtttgtcgaagcgagcggtcacattccagtcaatatcgcgcacgtcatccccatactgatactcgcggacctctgaaaaggccataccacgccccttgaaggccgaatgatactgaccggcaaaaatattgctcgaaagtccccgggtcttgatttcaatctgacggacacgctttaaaagttcacttgtctccattcctttaatatttgaccgtgttcccctggagcaaccaaaggaacacagcttagtcatttataatcatgcagccttccgactgcgaataaaagccgacggggactctcttccccgtctgtaaccgttacgggtatcagcgcatcagggcacttcaaccttgttcagaatcttgctgacgatttcatcagaagtcacgttggtagcttctgcttcataagtcagtccgatacggtgacgaagcacgtcatgagccacgaatctcacatcttccggaatcacgtatccacgacgtttgatgaaagcgtaactgcgtgcagccagtgccaggttgatagaagcacgaggagaacctccaaagccaatcaagcccttcagttctttcaagtcgtatttttccggataacgggtagcaaatacgatatctgcaatgtactgttcaatcttttcatccagatatacctgacgaaccacttcgcgggcagcaataatgtcttcagccttcaaaataggacgaacttccgtacgttctccgttgatgttctgacggataatcttcttttcttcttccagcttcggataatcaataatcaccttcagcatgaaacggtctacctgcgcttcaggcaacggataagtaccttcctgctcaatcgggttctgcgtagccattaccaggaaaggcttcggaagtgcaaaagtctgcttacccagtgtcacctgacgttcctgcatggcctcgagcaaggcactctgtactttagccggcgcacggttaatttcatcggccagtacaaagttggcaaaaaccggtcctttgttggcaacgaactgctcatccttctgactgtaaatcatcgtaccgataatatcggccggcagcaagtcaggagtaaactgcacacgactgtattttgaatcgatcaatgaagcaagggttttgattgccaaggtctttgccaatcccggaacaccttccagcagaatatgtccgtcagaaagcaacccaatcaataaagattcgataagatgtttttgacctacgattacctgattcattccctccatcaggtttgttacaaacgcgctctggcgttcgattcgttcattcaattcacgaatgtcaatagcttcagccataattttcttctattttagttctcttttttttcattaaaaaatgccctttcaaaacatatatctaaaaagacaccccaaaattaaggtattcccttaacaggcacaataaattttgataaaaaaatatagacgggtttcgccttttaaggcttattgaactaaagaaaattaaaaaggccttgtttgaattgaaacaaggcctctcgttattttttaggagtaagttgcggaatctgaattgtggtacccaccggcacgttatccggatttttgataatagccttattgtgcttcaccagataaggccatagttttttatttccgtagaatttcagggccacacgtaccaggctctcccctggtttaagggtatatgagccctgatttccagttatctggtattcaaccgtatcggctaaggtttcccttttcggtacagacgtagaagctacgggagttttttctcctttcttcgcgacggttttcaaggtatccttcttctgtaccaaagaagaatctttttttacaactaaagtatcagccacctgcaaggagtccgaaaccacaggcgcaggcgttttctgcgtttcattcatcagtttctctaccacttgttccggaatataccgtcggcccgaggtcaatacccatgtcacgattcctcctataaaaatacccaccagcaagatggaagcaatcatacaccagggtatattctttttctcttcagccggttcttttatcccagtaccagcttctgtagaagctgttgtttcatccgaagacgcatcctcttgtactacagttacttgttcagtatcctccaccacttcattcttttgttcttcctctactaatacagtagcggcaataccagtttcagcttccgaaagcatctcttccgtttccggtaagccatccttttcatcatccgaaatggcttctgaaatctcttctccttcctcgtttacttccgatacactaccttcatcgggaaggtcttcaaaatgcacatcatcattaagcagaacagactgaaaatgcgcaaaaggtttatttatcaagtccctcaatccagtttccggaacaaaagacacacgtgtgtgctcctttatctctatcgactcccctgtatttacatctacactttttcgagcttcaatgtttataagcttaaaagtacctaatcctttaacctttacgtacttgtctcttgccaaggcttcttcaatcaaattcaagaactccttcacaaacaatgcagcctctgcagggtccaactggcatttccgggcaaacgactccacaagttcctgtaaagttattttatcactcatccgatgaaatgtttttaaacttttctttcaaaacagcacttggcttaaaagctaacgccaatttgggaggcaccaaaaagcgctgcttagtgacaggattcacagaaatacgttccattttctttttcacctcaaaggaaccgaagccttgcaaattcactatcttatcttcctgcaatgtctgcgacaagcactccgtgaaagaactaaccaaggaggctgtatctttctcggttttatccagacggcgggacaattcttctatgaattccttatttgtcattttattttacgattgtagcatacaaatcaaaatcatctgcatcgtacacttttacccgatggaaactgccgattctcaagcggtgattttccacttttatcaacacctccggatcgacttccggtgaatcaaactgtgtacggccgatatagtaatcgccttccttgcggtcgatgattaccttgaattcctgtccaatcttgcgatgagacaagtcggcagagatttcctgctgcaattccatcaatgcatccaaacgctgctgcttgacttcctgcggaatctcatccttataatgcttggcagaataagttccttcttcttccgaataagcaaatgcccccatacggtcaaaacgtgccgtgcggacaaattccatcagttcctcaaaatcctgctccgtttcacctggatgacctaccatcaatgtagtacgtaaatgaatgccaggcacttccttacggaatttctctatcagctgataggtttctgccttcgtcacatggcgacgcatcttttgcagcatgttatcgctgatatgctgcaaggcaatgtccatgtacttacatacattatcattttcacgcattacgcggaacaaatcttccgggaaatgagcgggataggcataatgcagacgaatccattccacacccggtatatgtgccatctgctctatcagctccggcaacatctgttttttatacaaatccactccgtaataggtcagttcctgtgcaatgacctgaaattctttcaccccttcggaaaccagcaagcgcacttcgtccagaatttcttccataggacgagacacatgtttaccggtaatgataggaatggcgcaataagaacacttgcggtcgcaaccttctgatattttcaggtatgcataatgcttcggagtcgtcagatgacgctcaatggcaaattcagaatgataggcctttcctaaatcggccaaaagttcattccagttgaacttcccatagaatttgtcgacctgcggaatttccatctgcaggtccttcaggtaacgttccgacaaacagcccattacataaagtttcttcaagcgtccttcttcctttgcctgacagaactccagaatcatgttgatagattcctctttggcatcgccaataaagccacacgtattgataacggcaacttctccctgcggatggtcgctgtcatgtgtcaccttgtatccattagcttccagctgcttcatcagcttttcggaatctaccagatttttcgagcatcctaaagtaattatatcgattgtattctttctcatttttcagtggttgagccaaacaatgaatctacgaactcacggcgacggaatatctgcaggtcttccataccttctcccagaccgatgtatctcaccggaatcttaaactggtcggaaattccaatcactactccacccttggctgttccgtcaagtttggtgatagccatggcggttacttctgtagccaaagtaaactgtttggcctgttcgaatgcattctgcccggtagagccgtccagtaccagcaacacttcatgaggtgcatcgggtaccacctttttcatcacgttcttgatttttgtcagctcgttcatcaaaccaatcttattgtgcaaacgtcctgccgtatcaatgattaccacgtcagcattattagccttggcagaactcagcgtatcaaaagctactgaagcagggtcagctcccattttctgttttattaccggtacacccacacgttctccccagatgtcaagctgttctacagctgcggcacggaaagtatctgcggcacccagatagacctttttcccggcttttttaaactgataagccagcttaccgatagtcgtcgtttttcctactccgttcacgcctaccaccataatcacataaggagtcttatcctgaggcacatcaaaatcggcagcatccaccgtattgttttccatcagcaacgccgcaatctcctcacgaaggatattgttcagctcctgtgtattcacatacttatcctttgccactctggtttcaatgcgcttgataatgttcagcgtagtttctactcccacatcagacgtaataagcacttcttccagattgtccagcacctcgtcatccacctttgattttccagccaccgcacgtgctatttttccaaatacactttctttggtcttagacaatcctttgtctaatgtttcttttttttcctttgagaaaaaactaaaaaatcccatacaacttacttttatcagtttctgacacaaagatataactattctcgctttcacacaaaaaaagttccttccatatttaaatgaaaggaacttttatttagcattttatatctcaaaagataaattatttcttgaagaagtcctgtactttttcgttaggaaccatttgttcatcaaaaacgtaagcaccagttttcggagacttaaccattttgataaccttagtataagaacgtccttctttacctgtctgaagggttgcgactgttttctttgccatggtctgttattatttaatttctttatgaactgttactcttttcaaaatcggattgtatttcttcaactccaatctttcagtggtattttttctattcttagttgtaatataacgagaagttcccggcataccactatccttcatttctgtgcattcaaggattacctgtactctgtttcctttagctttcttagccatagtctttctctccttttaattaaccaataattttgatagttttccaatcacaataaccttttgctaccgcttcgttcagcgctgcatccaggccttttttgttaataactcgcaagccgttagcgcagatgttcaggctaatccagcaatcctgttctacatagtagaatttctttgtaaacaagttcacatcaaaagttctttttgttcttctcttagagtgtgaaacgttgttgcctatcaaggctttctttccggtaatttgacaaattttcgacatttctatctagtttttatagttttattccatggttctctcaaacggagtgcaaagtaagtgattttattttatataaacaaatctttttccaataaattgaacttttactcctcttttccctgattttggcataattccaacaacaattggagggtttttgccgttgcagcctgaatatttttctcacggccttcatcttcggtcaatttagctgtaagcaccgcatcttttgttccggctgctacccaaatcgtaccgaccggcttttccggacttcctccgccaggaccggcaattccggatgtagccattgcataatccacatccaaagccttgatggcaccctttaccatttccacaacggtttcttcacttaccgccccatgctgttccagtgtttcggcatttacatataaatgcgttttctttacctcatctgagtaggcaataaccccacctttatagaaacgagaactacctgggatagcagttatgatggctgccacgttaccagccgtacaactttctgcagtagccaatgtatagccttctctccagaaaatttcacttatctccttacttagtgttttggtttctactgacataatctgttttctctaaattgttacttaatggttacccgtgaataagcgggtttgtctatagtgcaaaaatccttgtccaaaaacttataatatcccgtaatggcgatcatggccgcattgtcggtagtatacccgaacttcggtatgaaaatgttccagccatattttttcgcatgttcacggaaagcgtttcgcaggccgttgtttgccgatactcctccggctacggccacttccttgatgcctgtatcctttactaccttacgtaatttatccatcagaatgtctacaatcgttttttccaacgaagcagccaaatccgtcttatgatgttctacgaaatcgggatcttctttcatccagtctctgagcgagtacaggaaagaggttttcagtccgctaaagctatagtcatagcccgggatatgcggtttgctgaatttaaaggcttccggattaccctgacgcgccagcttgtcgataatcggaccacctggatagcccagccccatcaccttggaacacttgtcgatagcctctcctgccgcatcgtcgatagtctgtcccagcacttccatatcattatacgcattcacacggataatctgagagtttcctcctgaaaccagcaggcagataaaaggatatttaggctgtacgttttcaccgtcgggctcctgaataaagtgcgccagcacatggccctgcaaatgattcacctctaccatcggaatatccaacgagcgggcaagtcctttggcaaaagacactcctaccagcaaagaacccatcagacccggtccgcgagtaaaggcaatggcactcaaatcttcctttgccactccggcacgtttcaatgcttcgtgcaccaccggaacaatattctgctgatgtgcacgtgaggccagttccggaaccactcctccgtaagcttcgtgcaccgcctggctggcaatcacgctcgacagcaatacgccatcctttatcactgccgcagaagtatcatcacaagaagattctattcctaatattattgtactcataacattcttctattattaataggtcaatatttcaagtccctgctccgtcattacgaaagtgtgttcccactgtccggaaggaagctcatcctccgtcaccacggtccatccgtcttcttcgtcaatgaagacttcccaggttcccatattaatcatcggttcgatggtaaacaccatgcccggcacaagcaacatacctgtacccttcttgccaaagtgttctacatccggttcttcgtggaactctactcccacaccgtgaccgcacaaatcacggaccactgaaaatccgttcttcttcgcgtgtttctctacggcatggccgatatctcccacaaagccgaaaggacgggctgcttccataccgacttccagacattcttttgccacacgcaccagtttttctttctgcggagtggtttttccgataatgaacatacgtgaagcgtcggcataataaccgtccagaatcgtcgtacagtccacattaataatgtcgccttcttccagaatttcctcttcgctcggaattccatggcaaaccacctcattgatggaagtacaacagctcttcggaaatccctcataccccaaggttgccggaatggctccgtggtcccgggtatactcatacaccagcttgtctatttcggccgtactcattccagcgtggatttccttttccaccaggtcgagcactcccgtattgattacgccgctacgacgaattccttcaatctgttccggagtcttaatcaactggcgagtcggaaccaaatgccctttatcctgataaaacagcactttcttgtccaattccgtcagttccgcccctttgggcaccctccagtttatcttatgtctcttcataatcgtcttttttacttatgtgcaaaggtataagaaaaaaatggaatagcgtacgggaagcgatataaaaaacgctggaatttgcaggcgcattgtcacatttctgtaatattatcattaaaacaattaagagaaaagaaaaacacgccattccaatattattttgttagcataagatttgttacaacaacaaatttttatatcttcgctcagctactacattacaataactacattatttttggaattatgatgaacaaaaaccaaatcggaacaaatgcgggtatcgtgtggaaactcctttccgacaatgcccactgggagtacgacaagcttaaacacgcatccggcctgtcagacagagacctgaatgcggctatcggatggctggcccgtgaagacaaaatagattttgacattgacgagcagcacgaccgcttgtttttacatgtcaatgtctatatcggctaacacaaaataccatcagagaaaaggctctggtggtattttggttttatgtcagacaatccggttcaccgtcacatcgggaaactcatgaagcatcatcaagagcaatccttcctcattcactctttttgccctgattaccattgtgatgcgataggcttcatggttgttctcatacaccttgttcatctcgtaggaggtaatctgaaaattctcggaactgaacttgccggaaagggctttcaaggcctcggaattctctgccgtaagctcgataatcatacttcgcattcctatacttttaaaacagtagctgagaacctccaatcctgctaataccaggaaagtagccagaatacctatcatatacatgcccgaccctaccgcgagtccgattccggccgtagtccacacaccggctgccgtagtcagccctcgcaccacctgcttctgcaacaggataatggtacccgccccaataaaaccgataccactgaccacctgggcagccagacggctcggatccaggcgcaccaaatccttctccagcacatccataaagccgtattgcgacacaatcatcagcaacgcactgcccagtgccaccaggaaatgcgtgcgataacccgcctcctttgcccggtattcccgctcaagcccgataagcacccccatcagaccggccacaaacaaccttaaagaaaaatctacgtaaatattcatatacttccagctaaaagttctttccgaaagatacgaaaaaacatctgaaaacccaagcacacggacaagaatacgtatttgtttattctatgttttccaaagcggagacatacgttttccaacgcagaaacatacgtttcccgtccggaaaacatacagtttagctctgagaaacatagaatacggacaaacagtttcctcacatccccctgacattttctctattacagaatgtccaagtggtttcaggtcaaattcttccgtttcttttcaccacaccttttcttttcttacatttccgtagtttcgtttttttccgtaattttacgctcgattttacagcataactttatgaaatataaattattagtattagacctcgacggaacgcttaccaacaagcagaaaaagattacccctcacaccaaagaaacactgctcaaaattcaggagctaggagtgaaaattgtactggcctcgggaagacccacgtacggcattgccccgctggccgagcaactggaattgcaaaaatatgaaggctacattctggcttacaacggcggagaaatcatcgactggaaaacgaaggagctgatgtacaagaacctgctcgaccacgatgtgcttccctacctttacgaatgcgccaagaagaacgactttgccattgtgacttacgacggggaatacgtactgaccgagaaaccggacgatgagtatgtgctcaaagaggcgttgctcaatgtcatgaaaataaagaaggtagacaatttcctggatgccgtgaaacatccgattgccaaatgcctgattgtgggcgaaccgacccgactggccgagctggagaaagagatgtacgagcacctgaaagaccgcatgggtgttttccgctcagagccttatttcctggagctggtccctaagggcatcgacaaggcccagtcgctggccgttctccttaaggaaatcggacttacccgtgaggaaatgtttgccatcggcgacggattcaacgacctgtccatgattcaatacgccggactgggtatcgctatggctaatgcacaggaggtagtaaaagaaaacgccgacttcatcactttgtccaatgaagaagacggcgtggcctacgcggctgaaaaatttattctgtcttaggcttccggtcgaagaacggatttttggatgatgcactcacgggtatggcgtacacctgggtgcatccatccagccagtcaagttgctgggccgccagaccggccgagaacatcacacgcgtatctacccgatggtcggccgctactgaacaagccgaaccgatggcaattcctacatctacactattgatggcacagggcactccctttttgcggtctccgcaatgctcatatccgcaatgtccacaatccagcccctgcggaagcgagcgcgtacctatcagcaccacacactctgcctggagaatgttatccgcatcgcgcaggaaaaacttaaaaccattgtcttcatacatctgcttcatcgtatcagaaaggatacggatgttgctttccgtcaccatggccacttcaataatgtctaccccctttcctttgggagctgtacgtgccgccgtcatcatttgttgcgccacctgcaacacttgttcatggcggctgtctctttcattcagtatcatattccattaaagttaaaaacatatatgcaaaaagggttatatccgagcttttgccataaggcatcagatgctctaaatataaccctttctcgataaatccgctacggatttatttcttttttccttttttcaggtcattttcatgaatggcctcttctacttgataagccggagcatgttttttatgcatacccttcggttttttattaccggcagctcccatagtaaatacctcctttcaattccttaaaaaggtcaatgtaaaaatgtgattatttaagtatatccaattgtttgaaacacttaatcaatttttcaatagcgaagtccacctgttctttggtgtgagtagccatcaatgcaaaacgcaccagtgtatcctgaggagcacaagctggaggaattaccggattgataaacactccttcgtcgaaggccagcttggttacttcgaaagtcttgtccgtgtcgcgtacgtacagagggataatcggactttctgtttcaccgatttcaaagcctgactcacggaaacgtttcagagagtagttggtgatttcccacaaacgctcctgacgttccggttctgtcttgaaaatatggatggcttctcttgctgcagccgtagcagctggtgtattacttgcctggaatatataagagcgggcattgtggcgcaaccagttgattacgtccttgtcacctgccacgaaaccaccgatagaagcgagtgatttactgaatgtacccataatcaggtcgatgtcttccgttacgccgaaatggtcgcacacgcctcgtccctgtcttccgaatacacccagaccatgtgcttcgtccacgtagatgctggcattgtatttcttcttcaggcgaacgatttccggcaagttagccaaatcaccttccatagagaacacgctatccaccacaatcagtttgatggcatccggttcacacttctggagctctttttccagggcatccatgtcgttgtgtttatacttcagctgggtagcaaaagaaagacgacgtccgtccacgatagaagcatggtcacggtcatcacaaatgatgtaatcgccacgtccggccaactgaggaatcacaccttcattaaccgtaaatccggtagagaaacacaatgcttcatctttaccgacgaactctgcaagttctttttcaagttctacatgaatatccagcgttccattcaacagacgagaacccgcgcatcctgtaccatatttgcgagtagcagcaatagccgcgtcgatgattctctgatcatgagtcagacccatataggaatttgaaccgaacatcaatactttctttccgtccatcattacctctgtatcctgggcactgtctatttcacgaaagtacggatagacacctctttccatgtacatctgaggtactctgaatttacttaatttttcttgtaataatcccatattctaatatctggtaagcatcccagcttacattaaacttcattacttttgcaaccgtttcgttacaacattttcattaagaacgtgcaaagatacaaaaaactcaaaattccgatacgaatccctgaaaaaaaataacaagagtatcaattataggggcaatttgccctaaactatgaaagataatattatttttgtactcccaaattttaaggaaacaggtttatggagacaaaaaagcgaatcacctttgtggtaaaccccatatccggtactcacggaaaggaattcatcctacgacttattgaaaaagaactgaatcattctatatatgattattctatccggaaaacggaatatgcaggtcacgcttccgagatagccgcacaagccgccgccgaacatacggacatcgtagtggccatcggcggagacggtaccatcaatgagataggacgggcgcttatccataccaatactgcgatgggaattattccatgtggttcgggaaacggacttgcacgccatctgcatatacctatggaaccgaaaggggccatcaatgtgctcaatgctggaaatgtgaagacgatagactacggtatcattgacaaccaccccttcttctgtacatgcggagtgggattcgatgccttcgtaagcctgaaatttgccgattccgggaaaagaggtctgctgacctacctggaaaataccctgcacgaaagcctgacgtatgaaccggaaacgtacgaaatagagaactctacaggtaccgtacgctacaaggcattcctgatagcctgtgccaatgcatcgcaatatggcaacaatgcctacatcgccccgcaagcctcgctgaccgacggcatgatggacatcacggtgctggagccgtttaccgtgctggatgtaccttctctttcattccagttgttcaaccggacactcgaccagaacagccgtatcaaaacgatgaaggacaagagcatcatcatacaccgtgcacaggagggagtattccattttgacggagacccgatgatgggcggaaaagacctgaaggtggaaatcattcaccaggggctacacgttatcgcgccgatacgtcccaaacagatgccttctcccccgctgaacattctccagcacttcaccgactttatcggacgacgtcccatcacttcggccattgcccagaagcacaagcaactcctgatgctgaaccatcacatcctgagacgcttgtcgaagaaataatcatttcatcttacaaggccagatagaaatctctggccagttcactaaactccggtgtatagacatgacgctccgtctcgatgggaaggtgcgtgatttccgtctgcgcacaaggatgcttcacgaacgccatcagcacacgcttggcgggcaattcctggcgtggatgcacccaggtctgccgcaaaagatgcaaacctttcccgagggctaaagccacaaaatcggccgatgccgtagccggaagtaccaccgaaaaactacctttttcggacaacaaaaccgagactttcgataacaaagcgtcaaagtccagttcatcggtatgccgggccgtatttctctgtgcctgagggcatttcacggactccacaaaatacggaggattcgacacgatggcatcaaaacacccgttccattcttccggtgccttccgtatatcaagccgctctacctccatccggtcagaccagggcgtacgggccacgttttcacgggcctgctccacggccgcttcgtcaatatcaacggcggttacaaaggcatccggattccgctgggccaacatcaaggcaatcaatccgcttccggtaccaatgtcaagcaccttccgtgccccgtccacttgcgcccatgcgccgaccagcacgccgtcggtgcctaccttcatggcacacttatcatgaaaaactacaaattgcttgaattgaaaatatggatttggcataacttatgtctaaaaatttacgccaaaaatagtgaaatccccatagaaaacgcttcaacctgccattattttacataataaaagaggtatttgacacaaatagtttccaaattacatgcggaatgattaactttgtgccgtttttgagtaataaaaaagcttcttaattcagaagagaaaacaagtatggtaaaaaagacaaaaaacaacgagattctggtaagtgcagaaggtaatgacattccgatgatggcagaaattgaaacgcttccggtggacaatgcaacggatgacctcacgggagaactgcccgtcatgcccctgcgcaaccttatgatatttccctctattgtcatgcccgtcagcgtaggccggcaacccacattgaaattagtcaaccaggcatttcagagcaaagagcctatcatcattaccacgcagaaggtgagtgaggtagactcgcccaagcagaaggatttgttccccattgcggtaatcggcaaggtgctccgggtgttcgaaatgccgggaggaaccattacggccatccttcaggctacgggtccgaaggtacaactggaagaaatcacttctacccgccccttcctgaagggtaaggtttcggtgattgaagaggacatgaaggacgagaaatccgatgagttcaagacactgattgacacttgcaaggagttgagtgccaaggtaattgaattgtccgatgaaatttcgcccgacacttctttcgccttgaagaacctggacaacaacgaggtactggtcaacttcatttccggcaatttccccttccctatcaacgagaagtacgaattgcttcaaacgaacaacctgaaagaccggttgtaccgccttatccagttgctgaacaagtacatccagctggccactctgaaacagagcatccagatgcgtacgcgtgaggaactcgaccgccagcaacgtgagtacttcctccagcaacaaatcaagaacattcaggatgaactgggcaacggacaggatgacgaaattgacgaacttcgcaagaagggagaaaagaaacgctggaaaccggaagtaaaagagacttttgagcgtgagctgtccaaactggaacgtatcaacccgcaatcgcccgactataacgtgcaactgacttatcttcagacattgctctcacttccgtggggcgtgtatacacaggatgtcatcgacattccgaatgccaagaagatactcgataaggagcattacggactggagaaggtgaaagaacgtattctggagcacctggccgtgctgaagctgaaaggtgacctgaagtcgccgatcatctgcctctacggtcctccgggagtaggaaagacttctttgggacgttccatcgccacggctctgaaacggaaatacgtgcgtatgtcactgggtggcgtgcacgatgaagccgaaatccgcggtcaccgcaagacgtacatcggtgccatgccgggacgtatcatcaagagcctgatcaaagcggaaacatcgaatccggtcatcattctggatgagattgataagttgagcagcgatagccatggcgacccgagctcggccatgctggaagtgctcgacccggaacagaacaacacgttccacgacaattacgttgacattgactacgacttgtcgaacatcatgttcatcgctacggccaacaacctgggcaccatcccatctccgttgctcgaccgtatggagctgattgaagtgagcggttacatcaccgaagagaagattgaaatcgctcgccgtcacctcattccgaaagagatggagaagaacggcctgaagaaggaacacgtgaagttcagcaaggcggccattgaatacatcatcgagaactatacccgtgaaagcggtgtgcgtgagctggaaaagaaaatcagcaaggtgatgcgtaaaatcgcactggaaattgccagcgatgagtttaccggtacccatgagctgaagccgaaagatattgaaaagttcctcggcgcacaagaatattcccgcgacaaataccagggcaacgaatatgccggcgtagtgacgggactggcctggacggccgtaggcggtgagattctgttcgtagaaaccagcctgagccgtggaaagggacaactgaccctgaccggtaacctgggctcggtaatgaaggaatcggccatgctggcactggagtacctgaaagcacatagccacctgctggatttgcccgaaggtatcttcgacaactggaacatccatatccacgtgccggaaggagctattccgaaagacggaccttctgccggtatcaccatggtcacctcactggcttctgcacttacccagcgcaaggtgaaagccaacctggccatgacgggtgaaatcacccttcgtggaaaggtgcttcccgtaggcggtatccgggaaaaaatcctggcggccaaacgtgccggcatcaaggacatcatcctatgtgaggaaaaccgcaaggacatcaatgaaatccagccgatgtacctcaccggaatgactttccactacgtgaaggacatcaaggaggtgctccgcctggcactgaccgacgagaaggtggccgatgccatcgactttaccatcaaagaagataaaaacaaagaaaaccctgcacaatgaaatttgaattacaatatacggaccccaaatcgaatgcccgcgctggtctgattacaacagaccacgggcagattgagacccctatcttcatgccggtgggcacactgggtacggtgaaaggcgtgcatcttcacgaactgaagaacgacatcaaggctcagattatcctgggaaacacgtaccacctctacctgcgccccggactggacatcatcgagggggctggcggactccataagttcaacggattcgaccgtccgatgctgaccgatagcggcggcttccaggtattttctctttccggcatccgcaagttgcgcgaagagggcgtggagttccgctcgcacattgacggttcgaagcacttgttcactcccgaacgggtgatggacatcgagcgtaccatcggtgccgacatcatgatggctttcgacgagtgcgcccccggtacttccgactacaactatgccaagaagtccatggaactgactcaccgctggctggacagatgttgtgcccgcttcaacgaaacggagcctaagtacggctacaaccagtcgctcttccccatcgtgcagggatgcgtatatcccgacttgcgccgccagtcggccgaatacatcgcctcaaagaatgccgacggtaacgccatcggcggactggccgtcggtgagcctaccgagaagatgtacgagatgattgaggtggtcaacgagattctgcctaaggacaagccccgctacctgatgggtgtaggtactccagtcaacatcctagaaggcatcgaacgcggtgtggacatgttcgattgcgtgatgccgacccgtaacggacgaaacggcatgctctttaccaaagacggtatcatgaacatgcgcaacaagaaatgggagaacgactactcgcccattgaagctgacggagcatcttacgtagacacgatgtatagtcgtgcctacctgcgccacctgttccacgcacaggagttgctggccatgcagattgcctccatccacaacctggccttctacctctggctcgtaggcgaagcccgcaagcacatcattgccggcgacttctctacctggaaaccggccatggtgaaacgtttatctacccgattgtaattgtagtttacgacgataaatatgaaacacaatgtgttccagttgttccgttcctacctgcaagccggaaaggaacaactgaaaaatttaaaaggaaacccgttcaagaagaaatggttgaaacggctggacaggtacatcatcgtgaagttcctgggcacctacttttttgccatcgccctgattatctccatcgccgtggtgttcgacatcaatgaaaacattgacgacttcatcaacaacaaggcgcctatcagtgccatcatcttcgactattacctgaacttcattccttactacacgaacctcttcagtccgttgttcgtattcattgccgtgattttcttcacgtcgaagctggcagagaactccgagattatcgccatgttctccaccggaatgagtttcaagcgcctgatggtgccctacatgatttcggccgccatcatcgcactggtcacctacgtgctgagtaccgaggtgattcctaccggtagcgtcacccgactgaagtttgagcaagtgtacaagaacaagaagcgggcagactacgtgcgcaatatccagctggaggtagatacaggtgtcattgcctacatggagcgctacgaagactacaacaagacggcttaccgcttctcgctcgacaagtttgaagaccacaagctggtatcgcacctcacggcccgccgtattacgtacgacaccaccaccgtgcaccgctggattatcaaggactacatgatccgtgagatgaagggcatgcgtgaaaccatcacccggggcgaccgtctggactccatcatcaacatggagccgcaggacttcctcatcacgcgcggccagcaggaaacgatgaccagtccccagctacgggagtacatcgacaagcagaagcaacgaggcttcgccaacatcaaggtgttcgaagtggaatactaccggcgcatcgccacctcgtttgcggcctttatcctgacggtcatcgggctctcgctttcgtcacaaaaacggaaaggaggtatgggacttcacctgggaatcggtatcgcactgagcttctcctacatcctgttccagaccatctcgtccaccttcgccatcaacggaaacgcgcatccgaacctggccgtgtggattccgaacatcctgtatctgttcattgcgatttatctctaccgcaaggcaccgaaataaaaagaaaatctcctcacaaatcaccacgattcatggatttgtgaggagattctgtattataacgattcaatcgcttctattgaatgaaattatttacctgactctgcggattaagaggagtctgatccgataagaccaacgttttaatcatgtgctttgttccttgtttatatttctgaaaatgctccgacgcaatatgtgatttataagcctgctcacttgcataggtttcaagaatcgtaaccttacacggattttccttttcggcaacggcatacatggtcaatacccccggttcagtacgtaatgaaatctcacccacttccaccgcatattgcatatattcctttataaactccggatacacttctattttcgataacctcacaataccatcgggcgacatcggaagtttggcacacatgccgggctttttgtctaagttcaaacacttgccgattatttctcccgtagcaagatacgagtacgtcggaaactcaaacaacacaggtttcaatcgggtataatccagtttcccatcttgaccgagcacttctggagctgcataggtattagctatggaacaaataaaattgtcaaatccctcggtttcataaatatccaccacatcacattccatggttaatggtgatttgtcaataaccggagtaccattctctccaaaatgatagtcaaacaccgtcgatttatccaccgaatttccacttacacttcccacataatcagccgcaggcaacatttcacggctcacaaggtttacagacaatttctttgacctccttattccctgattggtataatgatgtttactcatactcagaagaatacggtcatgcccaataattccagtatgtcccactacaagccagtttactttttcattgactaccgccccaaccaccgtcatcggtttgggataaagcgccagtaccgaacctaaatttttcttttccatatccgtttcattttgcaatatcacactttcttcattcctcgtgctacaggagcacacaaggaacaacaaacatacatattgaataaattttagcatagcattcttattatttctgttacttatcaatctgactctcggtaaacggatcggcacgatgccccataaggtctatttgtgaatattccctgtcaaattcctccatctcgtaagccgtaagccgcacatgagctgctcccaagaaatcatcgaggtggttcggattcgttgtgcctgggatgggagcaatccatgacttacgcgaaagcatccacaccaaggcaaactgggcaggagtaatattctttcgctctgcccatttacacacaagtgacacaagcggcatattatgcttcaaggcttcaggggtgaattgcggcaatgtggcccgcctatcaggtttctcaaaacggctttcctcatgaatcactcccgtaagaaaggcccttcccaacggacaatatggaacaaaaccaatgcccagttcttccagcgtagggaatattttggtctccggttcgcgccaccagatggcatactcgctctgtacggccgaaagcggacaaacggcatgtgcccgacgaatagaacgtgcactggcttccgacaatccccagtgcaagacttttccttcctgcatcaggttctttaccgtgtctgctacctcctccatcggcaccttcgggtccacacggtgctgataaagcaagtctatgtgatccgtacgcaagcgtcgcaatgaaccttccacagcccggcgaatatggtcaggacgactattcaaggccgtgggctgtttctcttccaccccgaaaccaaacttcgtaccgatttttactttgttacgaaaaggagcaagtgcctcgcctacccactcctcactggtataagggccgtacacctctgccgtatcgaaaaaagtaactccctgatcataagcccgacgaatcaaggcaatcatatccttcttttcataccgtccgccatagtagcctaccatgggaaggcatcccagcccgatagccgatacatccagtccgcccaaattgcgatgttccatatctccacgtacagactgacccttactatccgatgactgggagaaaaccttcgatacaccggtccatgcacataccgcagaaaaggcggctacagacgacatcttcaaaaaatctcttctatccataatctgaatttttttacgagccgctacggctcaacaaccctcgtaatatttccatttcgttatccgtgaggcggaaaggaaagctctccttttcgggcgcgggacccccggcttcctgcactaaaaaacattgcatcactctttccgtagtcgtgcgataacggtcggccatgaagcagaccacttcatccttgtataaattggcgggaatgtctattggtttatccatctttcttgttttcttgatacggcaaaattacccctgcacgggcagaagagcgtaacaataccacggaaggtcgtaccgtttttacggattttgcctgctcacgtgcggccaattggctgagataatgtatttttgtgaagggacatcccgacgaaaacaaaagaatggttatgagcaagattttgaaaataaggaatgtaggagactatagccagtgggtgggacacacggacacacatccgctggtcagcgtcattgactatgcagaagtgtctcccgtacgccattgcctgaacaactatagtgtgtatggcatcttctttcacgacgaggcgaacatcgacctggcctacggttgcggcaaatacgactacaaggaaggaaccgtcatttgcgtggctcccggacagatagggggaaaggaggacaacggtgagctggtcaacctgacgggatgggccttgctcttccaccccgatttgttgcagggcacggcactggagaagcatatcagggaatattcatttttcgactaccgcgtgaatgaagccctgcacatgaccgacgaggagcacgacatcctcgtgtcgctgatgcgccagataaaagatgagctacagaaaaagcacgacgcgcttcaggatgccatcctcgtgggttacatcgaactgatgctgaacttctgccagcgtttctacaaccgccagttcatcacccgcaagctggtcaactcggacatgctcatgaagttcgaccagctcctgcgcgattactacgaagagaaaatccagcttacctcgggcatgcccaccgtgcaatactgtgccgacaaactatgcatgtcggccaactatttcggcgaccttatcaagaagatgaccggggacacggccagtaactacatccgccaggacctcatccagcgagtgaagaacgagctcgccagcggggcaagcatctcgcaggtagcctacgaattaggctttgaatacccccagcacctgagccgtatgttcaagaagttctgcggatataccccgaccgactacctcagacagatacagaaaaagcccggctgctgaacccgtcagccaccaggctatttctccttcaggtgtcagtcaccggctatttcaccactatccacacaccctctccgcgtgccttcgcttccacgattttccgtttcaggcgatacacccagagacgggaatcaagcaacaagccgggtttccggcggcatcccacgaggatgcatcctgcggtgtcgtgcaccgagttgcctgcatgaatgcggatgccttcgaacaagggaacgtgaaggagcagcggaagccactcgccaaacctgggcgaacgggtgatgaccaccggatagcggccttcgggaatggccgtacgtccttccaccttgcgcccccggtgtccccaccctacgtcgcgccaggtaggttccagtgtatcacagaacggagttccgtctatctctatccgcccttccgtataatccttgtttttacatacacgagtcagtatcagttccataagctataatctctttttaagcgtttgatttatcgggcttaaccaccttcccatccttgcggtatttaagctttgagtaattgtcatttgtcacaattgtcacgtaacgccggtgcacccactggcggagcatgccgtgtaccccttccgcatccatgccctccgactggcgcacacgtatggcgtcggccagcgagaactcgtcggggagcagctccagcaagttgcgccgccccggtgtgcgggcatccgcaccccctccctgcgcttcctcgatagcggctccgaaaaactccatcttgcaccacatatcatactgaaggctccagcgcacaaaatcctctatggtcttgtcccagcggtagcccgaggccacgaaaagcacgcaggccttgagccaggcaatgacgttggcacggaacgacagattttcgtacacccggctttgcgaaaggcgggcaaactcggcattctcctcgcgaagcttcgcggccagacgataggcctgcggacaatctaccctgccgtgtgccttcgtcaggttctcgatgaagggacggagctgctcgtcgaacgaagcgtcgtacgtgccatacacgggcatgtctgccccgatttcccgctcggggatagtgcagaagttgatgcgcgacacaggtccgtcggtcagcacccgcgagaaataacgcttgcccttctgaatggtggtggccgcattccagttaaagcggatggtcaccttctcggtcacactctgcgtgcccacacgcgtctgcccgtaacggttgcccggatcgaacgccagacacataatctggaactgctggcctccccgtccgcttccacgaagcgcgtcgaactggtcaatctcgttcagtttcgtatagaggaaatgcccctccgcctcggcggtacgcatcacgaaggccggattcgtcatgtccgcatcgatttcctgaatcaccagtccctcgggacgctggcgcttgtccttgttggctcccttcgagttcacctccttcttccattcccgctcacggcgcaggttctcctcgtcgcgcaggcggatgtcggccatgatacggttgataggttccgagatacaatcttttccggcacccgttccggccatgagcacgttcatcagcgtagcctcgtgctccacattgtcgatgtagcggaacctcaccttccagaggtgggcggccagcgagggaaacacggcatgcgccacggccggacggtagatttcgggcgtgcggcttacgagcagacggatgagcggcggaagcttgcggggcatgggcggcggaacggacttgccggagtggacctccgtttcggtgtgcatcctttcctgttcctcctgacggagcacgtctttcatcaggcgaggcatggagcagaacttcgacgtgcaggccgaatggatgagtgcccgcatttcctcctcgtcgagcccgtagcggggcatgatgcgcagaaggagcgattcgtcgttgtcggtaatgtaacgcaggtgagaagccaggcggtgaaggcggtcgttgcgctcacccgccacgggctcccctcccgtcaggcggaaccagcgggcgatgaggtcggcataagggatgcccttgaacgagagctcatctacggaattgcccgccggattacgggcggaagatatgcttccaatgtccgcttcttcgtgggatttcgctttctgcacttcccgctcacgaaacaattccgcttcgtccaggtaaaggatgtagtcggcaggcacggcaaacgagctccgcgcatagtccttcacgcactggtcgtaggtgccgtcgtccagctgatgcgacatccagcgctgggcttcctccagccccatgcccggtgggatgacaaaaaacaggcggagtccttcggtagaaggtgtgacgtgggccagcacgatgcccagctcgcgaacccgtgcggccacgtgctcgcggaaaaattcgcgcggggcagggatatggtccacatcgtacatcgacagaccgctgggcacggcatcggagttcaggcgacgtccgccaggaaacgtggcatgaggggtaaagatgggaagctgcttcttgcgttcacttttcagggtatcgaaatcttccggtgccatttcgccgcgccgcatcgcctcaagtgcatcggctatctcggcacatatcctgcccaccagcggcgagtggactacctggtggaagagctcgggggtacatacgcgcaccacccggcttctgacattgttgcttattccaaacatataatgatttgagtttatgaattaaaaaataatgtagcttaccatccgaaagtatcattgaacgtatcgagcgcactatccacaaaatcgcttgcttggcggctttcatcggtaatagcatcagagggcacaacgcccgcttcgtcaagaccaatactaagagtaagccggacccgttcgcctcccaccgaagcccttccgtggcgcaacttaatgtacttcgtacccggcgcaggagcctggcgtacatgttcattgaaattaccttctgtagggcttaccagtccgatagtgccctgaatacggccgtgtccggccaaaagacgccgataaacggtatctgaaatctgtaaattaatcgtcataaaattcctggtttatgggtgaagagagaaagaaggcggccgccagtctcatgagtttctcccgtctccgcaacccggtttataaataaaaaaattccgcaaccacctgtgtgtcggtgattacggaagcaaaagtaagtaacgggccctggcctatcactttacctaaagtttacctaaagtcattttacatcatatttctttgctttttccatcattttctcgaatatctctatatagttatcattttgtttagacgcattaagtagttgtgaaagattcttgtaatctgcatcaaaaaaaactccaagttcctctatcaacttctgcttatttgaagcgatttgcccattttcatcttcaaacatacgtaactcaaacatggcactgagaatcttggcaaagttcgttttatgtttcttcgcaatccggaagtgactttttcctggttttatttcctgctgctccaatccatccttgtgtaatacttcataaatggcatctgagagaaacatatcactctgccaatactgttccatccgttcttttaaccgatgctcccccattcgccaaacgaacttattcatttgcctctgtatctgttcaaggtcttgcatagaagtatgttcctgaatcacacatatcaaatccaatgctaatgtacgatgtcttacgttatcgactaataacaaacataccaccagtaatgccatagtaacaattatagcatacgagacctcttcttctgatgccctctcatccattgagcttatatcataccaaagtttattccagaaagtctgacataaatagcgagattcttccggattttcctttatttcatcaagcattccagctattgctactgccatttcttctggagaaagccgaagcacaggcatcttaaatgaaaaatgcaaagcgacatcacaaacgaaccgataaagcaaaccattttcaaactgctcttcgatattttctctttcttccttctttaaccggcgtaatattttcatactcttttgtttgttcgcgtatataatctaatttgtttattaatccaaaacaagtaccctctctatctccaagcacactttgtccgttaataaaatcatccagcaaacctttatctatattgtaaagtgcacgtatgacgtcaccattacgatataccccaaattgttcaaaatgtacgctgatatgatatccattattacaacaaagtgcaaccatttgtgctaaatcttctttcgtgcggtctaaagtcagtgtaccttctttatcagcatcaaccttaaatgaacttcgtgcagctcctgtagctgaagccaatgatgctaaaaaacgtaaacgatcagtcataacaggagaagcatctacaggtccaaccttatccggattaggaaattcaaatacgactttctgtatccgctcgtttttctgggtcatctgctcctctatcgcttcccagaaatcacgtgtacgaacttttgcccgtatttctattgagaaccccaaaggtgcaagcacagcatgaaatgattcctgaagaatatcacgcaccttatccgtgttactatcaaatgctccagaacgttctatagctatttgtccgataccaaaacgattatctataatcacaaaacaataaggattcgactcttccttattttcatgataatcttgccagagtgttacatgttttacattacacacacgcatcagcgttactccattacgtgtcttaagaattgaattaggaaagcattgaggcaatccatccttattagagacttgatataaattaagctgattagcattaaataaatttccaaaataaacctgagcgttgtcatatacactcttattttcctggaaaagttcttttgtgtttgtttttaccagttcgtatttgtagattgcaaatttcataatctgtcgttttaaatagtttattttttcatctttccatttgcatgtagtttgtttaaaagacagcctatcagatttttctttaaggctcgtatataagtttccatcaacgtataatcaaacgtagaggaagaagtcacaggtaacaatacggtatcagtttgtatctttttattcgaaatggagtttccccatgaatatttatgcgaaagacttttatataaagccgcaacaaaaaacaattggatattctctgttcttccattttcatcattaaagcgaagaacaagattgtgactatcgttcgaaaaaaagtctttgggctgataagttatgaccaatgtttttccgccaatcataatcgaatttccttcttctttcatttcatcatcatatgagacatatgaaacaatagaattattaccttcacttgccgtaacataaggggtatttccacttcctaatataatatcagatttcaatatattatgggagtttctgacatcaaaaaagtctactatacttacctctttcatctttactttaccctcatttatacgccttaaagcttcagcttcatcatcagtaagtgtacaatcttcataattagtgtccaaactttcctcgtgcacattgtcatttctaatgatttccccaatttgccatgccaagtaatcttttacaactcgctgaaaatcttctgctactggacgaacatctacatttctatgctgggcatatgtccagtcatttccatctaaagtgatataatcttccacatagcaatcctgatagtattgtagattttcatcgtgtgctccacgtccgtaacgtattagacgcacaacttcatcataacgttccgtcgcatggtctgtattacgttagtttacactttgacttgatttttttcggttctgacgcgtatacccatcattggaaaaatctataaacttcacaacctgatgtatatcatgaggggctccaaccttaaatacataaatagccgtttgcacactggcttttccacaaaaaatatcactcatgtggatagaagccaccaatgtattgttttttagaatttcacgcgtgtaaggcaagccattcccgcttcctgcattctccataatcaacacggctgccataccaccatgatgcatcatacttaatgcacggtgcacaaaaacaaagccttttcccgattttgaatatggaggattcaataaaaatacatttgcaggaaagggttttccattgtattcaccttgttcatagttcccttcaaactctgtcaaagagtctccatgaataatgttcgaacttccgtccttcatcagaatcatgttgagtacagccaacatataaatatcagcaagtttctctatacccaaaagctgatacattttgatatgtgtaatcttacggtttagttcttcaggactactaattttttgtttggcatctgctatcatttgatgcatagacgaaataaggaaacctgccgaaccagtagcaaaatcccacacatagctgtccatattgactccacataatcgagccataagttctgtaatatagcgaggtgtaagtacaacatcattttttgcaccatcaggtacatccacccattcatttagaacattaaacaaacgacctgtaaagtctatattatgaagttctcccgtcaaaaacggaatgatattctgccgtacatctgcataaattgtatgaagagcactttcgccatcttttggttcttgtaacttagaatgaataaaaacgacgcgtaaaacctcttcaatcatttctatcttttgacgagggagttgcttttcactaagatagtcggaaattttattcataataacctgcccatcattattcttttctccttggtcaccacgcaaatcacttacactcaaaggactgacttttcctggcacacctaaaccagccattaccaaacctgtaattaactgaacacgttgacctacatctattttttgtccgtaatcttcatcgtgcattttctggttaatcactttaagtcgacgttcaatatcatcctccagttctattttctttaattcaatctcagaatcagtaagaaaaagtttatcaatatctttgataaatccatttacgtattctggtaaaagaaaagaaagatctgtatattcaccaactttcttcggaacaaataaattttcttttgatacatagtacactcccatttcataaatccgacctatggaagtatcatatccattcacgcctatggccacaacttctttatatgattccgtattgttcaaaatggcatgggcataatgaacggctccattgacggcatacttagcaatattaccataatgaggttctttatctttattcaggttacaaatatctccattcttatcgcactttataagatctccctttctcccttttacttcaatcattacaggaatgcgacgcatatcggaagtttccaaaaagcattttatatccggatagtttgctccttcacctccacttttactgggagccttgcgcaaggcctcttcaatttcagaattgatactttcggtttttgtataatatttaatactacgtaactgcgccttacaccagtcctccacttgttcttcaatgcttcttacatttttcgttgccattgcgctatatatttattatcgttttttatatctctcatgaatacctcatgagtttttatctttccacaaagataaatattttccataaataaaaacatattgctacaaatgctcaaaagttttttataatgaagccataatgtttctcgatgtcttctctgataataatgtgacaattgtgacaaatgacaaaggatatatagagacatatatatacttatattatatatattaatatatataatataaaattgaaactgattttctcgttttgtcattttgtgattgtcatttgtcacattgtcacgttcatcataataacctcaaaaagactggcttcttttttagacgtgacaaaaaagggagagtcagcaaatattacctgcacatgcaaaatatagttttcacaagcaaaaaagcaggtttaccgttccgtaaaacggtattctataaaaaaggatatttcattaactgattttcacaccttgatgctttctcgtttttgagaatcacggtagcaggaggtatctttgtgtcagttaaataaatcattaaaccatcatacaaacacaaaagattatgacaactggaattttaaagtatcggctcgtggaattaaagtaccccatcaatgaccctgaaactcctgaaacaagatggtacgcccgtgccgtacaagaccgtacaattgattttgaggatttcgtaacccacatgtcagaacacaattctccctactcacgcggagtgattcacggagtactcattgatatgctctcttgtttacaagagctggtactcgatggaaagtcagtccgtctgggagatttaggactgttttcgttaggcatttcgggagaaggtgctcctacacgcgatgtttacaaccccactaattatgtaaaagacgtacacttgaatgtacgcaacaccaaaacatggagtaacgctgagttacgcaaacgttgccgcctacaagaattgactgaatattctacaggaaaaacggaataatcagcctgatgtaagtttcacttttttattcacacaacactatcacacgtatggaaaacgacaagaagaacatctggaaaatcgtcattcagacactggtcaccatcctgaccgccatcggtaccacactgggtatcaccagttgcataggctgaaaaatgccctcgcacgcacaaaaagcccggctgctgattgtttcggcaaccgggctttcccgtctctatacaatacgcatcacttcagatacgtctggaagaagtgcgtaatcttgtcaaaaggaatcacatccaactggtcgtacaggtcgacgtgattggctcccggaataatcagcaactccttgttgtcgcccttcagcttcttgagggcatcttcactgaaatagcgcgaatgggctttctctccgtgaatcatgagcacggcactacgtatctcgtcgctatacgacaggatgggcatgttcatgaacgacaaggaggaagtcttgttccacccgttgttggagttcagcgaacgcttgtgatagccgcgcggtgtcttgtaatatccgtaatagtctttcacaaactggggagcatcgtcgggaagcgggtctaccaccccaccggccagcgcatacgtacccttgcggtagtcttccgtacgctgggcgttgagctgcttgcgaagctcatagcgcgcatcggcatccatggcatcgaaatagccgttggcattcacccggctcatgtcgtacatcgtagcggtaacggtagccttgatgcgcgtgtcgatggccgccgcattcagtgccatgcctccccatccgcagatgcccagtatgccgatacggtcggcatctacctgctcacaaatagaaaggaagtccaccgccgcacagaagtcctccgtattgatgtccggagacgccacatagcggggttcgcccccactctcaccggtgtacgaggggtcgaaggcaatggtcaggaatccgcgttctgccagtgtcatggcatacaggcccgacgattgttccttcaccgctccgaaaggcccgctcacggctatggccggaagttttccttcggcctgcttgggcacgtacatgtcggccgccagcgtaatgccatagcggttggtaaaagtcactttccggtggttcaccttgttgctcaacgggaacaccttgtcccattcgtgtgtcaaattcaaactcttttccatcttcatctccgattttaaaccgtccgttgtggcaagcaggctgcccgtagtcagaagccaagccgccgatgccgtgcacaacgtcttccacaatatatccatatagttatcactctattattctacgaaggcaaaaataacacaaaagccccacagagacatttccgtgaggctcaaatatcgtttctgaaaagttcaaatgcacgagggagcggccagtgccgtgggcggaatgccgtagcgtttcttgaaggccgtagagaaatgcgaagggttcttaaagcccacctccgcatagacatcgaccaccttccgccgttcttccttcagcaggtgataggccacttccaggcgcttgcgaatcagccatttctcgggtgtcagcgcgctcaccttcttgaagtcgcgcttgaaggtggccaggctacgtcccgtgtaatgcgccagctcctctaaggtgaactcgtacatgtagttctcgttcatgaagtcaagaatgtccatcttccacggtgtgctgaagtcgaacaacgcggtcatgaagcgcttatcggtatgaagcagggccagcaatccttcctgcaacttcaggtgcatcacgtcgtcctgcggtttcacttccggattgaagtaaggtgtcatcgaagcaaacaggctctcaatctcagccgaaggaggaagtttcatcacgccgggcacgaacctctccacatgctctgccttgtccgtgtggcgggcatactttccgtacatctcccgaaggaaggagcgggtgaagcacatgtaaattccgcaatactgctccccgcccgaggctttcttgtacatggtcacacgatggtcgcgcggaatgaacacgcactctccttttcccacgtgtatctgccggtgcccgtcgtcgagcaccatctcgcccgacaagacatagttcatggcgtattctctggaacggtgcacgcacgcatcggcatcgtcatagaaaaagctgaaaaacacattctggtaattgaatatgactttcatggggttatggcgtgaggttgtaggttctgttgtcatctctcttctcgttttttgtgaatggggtatgcacaaagatacaaataaaaacgtcgcgtttatcatcacggcggagcaaaacaaaaactcctttgagggcatcgttctagccacgcaaaggagtttctttcttcagggttccccaaggtctgcaaaccactcgcctcaggcgggcggtccgtataccttattatatattagtaacccagttctttttcaagagcgttgtatttttccttatcaagcttccagtagatgttcaacaagtactggccccacaactgacggttgtctggtttagcttcttttgctttttcgtagaaaggaagtgctttttcgtacagttccttaatcttagcttcgttggtagcatacttcggatcgtccatagaaagcttagagttttcttctacgatttcctgagccgggaagaatgagcagtcaccaatcttagaataagcttcagctacgaaatccttaccttctgcaataatctggttgaatgtagcgatggcaccttcgtagtctttcttttcatactgaagcacacccttcacgtacatgaagtacggagtagagttcttagccagtacggcatccatctgagccagaccttcgtcaatcttacctttctggatgtagtagtccatcaggttaccgatgaagtattcctgtgacgggaatttttctacaccttcctggatagtagtcaaccattttgctgagtcaggagtttcaccttttccgtaagcttctgccaggcacatcaatgaacggtaaccttcttctttgtgttccttaccgatagtagcgtatttgattacggctgcattgtctttcaatgaattagcggcaagagcggcatagttggcaatcaacggagtcaatgtgtcgttctttacggcatcttcatcggcgaacaacgggttctgcggagcgtctacatacaaaccgaagaacttcaaagcgttggcatagttacctgcattgtaagcgtcagaaccggcgttagtcaactgaggacgtacggtagccaatgtcttagccagtttctttctcaatttcggtttcttcaattcgccgctctgtaccttagcctgttctacttcgtcacactttgtgtagtattcgaacattttagccaagctgttatacaatttagcggtatcagcctgaccacccggcaaatacaatttcatgttttcgtcgtcatagatagacttctggaaatcaccagccagtttccatgtttcaggatcattggcggtagaaggatctgtcaaagcaggttcgatgatttgtgctgccttcacgggatcgctcttggcagatttagcttcctttaccacgctttcctgagcagaaacagcacatgcggtaaagaacaaagcggctgagaataatacttttttcataaggtttaaatttagtaatacaaatattcaagttagtttttgtccggattattcattcggttcgtccgtaacaggctgaatggtttctccgtcggcgggctggatgtccgttgccggagttgcttcgtcctgcacttcctcttcttcattttcagaagctaccttacatacggaaccaatctggtcgttgcgcttttcaaggtcaatcaggcgcacaccctgtgtggcacgtcccatgatgcgcacatcggccaccttcagacggatggtgatgcccgacttgttgataatcatcaggtcgttttcatcggttaccgacttgatggctaccagacttccggtcttatccgtaatgttcagtgtcttcacaccctttccgccacggttggtcttgcggtagtcttcaatgtccgaacgcttaccgtaaccgttttcagataccaccatgatggtttctgtttcaggatctttgatacagatcattccgattacctcatcctgaccgtcttcatcgagtgtgataccgcgtacaccggtagctgtacgtcccatttcgcgtaccgcgctttcatggaaacggatggcacgaccgttacggttggcaatcacgatttcattgtttccgttagtcatacgtacttcaatcacacggtcgtcttcgcggatagtaatggcgttcacaccattctgacgcggacgagaatactgttcgagcaacgtcttcttgatgacaccgttcttcgtacagaagagtacatagtgactattgatgaattccgtgtcgttcaggttcttcacacgcaggtaagccgttaccacatcgtctgcctcaatgttcagcaggttctggatggcacgtcccttcgaagtcttgttgccttccggaatttcatataccttgagccagtagcacttacccttctgcgtgaagaacagaagcgtgttgtgcatagtagccggatagatatgttcgataaagtcttcgttacgggtttcacttcccttcgagcctacgccgccacggttctgcgcacggaactcagaaagcggtgtacgcttgatgtatcccatgtgcgagatggtgatgaccatttcgtcatcggcatagaaatcttccggattgaactcttccgaagcatatacgatttccgaacgacggttgtcgccgtatttttctttcacttcaagcagctcgtccttgataaccttcttgcaaagttcctcgttgctcagaatttcttcgaagtaagcgatttgcttcatcaggtcttcgtattcggcatggagctggtcctgcatcagtccggtgagctggcgcaagcgcatttctacgatagcacgagcctggatttcgctcaggttgaagcgggccatcaggttcgtgatagcttcgttcggagtcttggcggcacggataatacggattacctcgtcaatgttgtccgaagcgataatcaatccttccaggatgtgcgcacgttccttggccttgcgcaagtcgtaacgtgtacggcggattaccacttcgtgacggtgttccacgaaatatttgatcagttccttcaggttgagcaggcgtggacggccatgaaccagggccacgttgttcacaccgaaagaagtctgaagcatggtcatcttgtaaagcttgttgagcaccacgctggcgttggcatcacgcttgatgtcgatgacgatacgcataccttcgcggtcggtttcgtcgttcacattcgaaatgccttcgattttcttgtcgttcgacaaatcagcgatgctcttgatcagctcagccttgttcacaccatacggaatctcggtcactacaatcttatcgtgtgtaggatgcgattcgatttcggccttggcacgcattaccacacgtccgcgtccggtttcgtaggcatcgcgcacaccgctgataccataaatatatcctccggtcgggaaatcaggtgccttgatgtactgcatcaggccgtctacgtcgatttcattgttatcgatgtatgccacgcaagcgtcaatgacttcacgcaggttgtgtgtcggcatattggtagccatacctacggcgatacctgaagcaccgttcaccagcaggttcgggatacgggtcggcatgacggtaggttcctgcaacgtatcgtcgaagttgttggtaaagtctacagtttccttgtaaaggtcctgcatcatctcctcaccaatcttcttcagacgagcctccgtatatcgcatagcggcggcactatctccgtcgatagaaccgaagttaccctgaccgtcgaccagcggataacgcatcgcccagtcctgtgccatacgcaccagggcgccatatacagacaagtcgccgtgagggtgatacttacccaatacttcacctacgattctggctgcttttttatacggtttgtcggatgtatttcccagttccatcattccgtaaagaatacggcggtgaaccggcttgaatccgtctcttacatcagggagggcgcgtgccacgattactgacatggagtaatcaatgtacgacgacttcatttcctcttcgatgttgatttttataattctgtcttgttcttgcatttaatacattattaattatacttcctttcaaggcttgtaaaaaaccatgctaaagtacgacttttagcggatatacaaaaacttttccaccaaaaaatacgtataagcctgcatttggagacacttgtaggaaatgtggcacgcattttgttaaatagaaagaaagacttgatgaagagtctttataataatgtatatttgcaagcctattttgaatataaacaattggagaagatatgaatttgatgagcaacgaatttacacaacaagtgtccgacatcgtcgtttacgggaaagaggaggccaaccgccttcagaacgaccatatcgaaccggaacatctgctattgggcatcttgcgcgatggagagtgtaaagccgccgaaatattgaaatcgttctacctcgacctgaaaggtatcaagaacgaactagaaacacaattacgggagaagtccattctagagaactactcacaggacatctcattcagcgaggaagcatcaaaaattttgacattaagcaaactagaggcacgattgatgaatgacgagaaagtggacaccccgcatattttattggccattatgagagacaaccagaataacgcatataagatattggaaaagaacgacgtaacttacgaaaagataatagaccgtctaaagcaggaggaaactccttttgacggactggatttcaatgatgacgaagaagaggaaggcatcggacgtcgcggaaacgcggacaagaacaacgatggcttcggttcttccgccaaccgccaggccacgcagaccgaacagaaacaagcggacggtggcacgccctacctcgacaattacggtatcgacctgaccaaggcagccgaaggtgggaaacttgaccccgtggtaggccgtgagaaggaaattgaacgtatcgcacagattctgagccggcgcaaaaagaacaacccgattctgattggtgagccgggtgtgggaaaatcggccattgccgaaggactggcgctccgtatcgtggagaagcgggtttcgcgtgccctgttcggcaagcgcatcgtttcgctcgacatgacggcggtagtggccggaaccaagtatcgcggacaatttgaagaacgcattcgtgccattctgacagaagtgaagaaacatcctgacgtcattctgttcatcgatgagatacataccatcgtgggagccggctcggcggctggttccatggacgcggccaacatgctgaaaccggcactggcacgtggagaaatccaatgcatcggggccaccaccctcgacgagtatcgcaagaacatcgaaaaagacggggcattggaacgccgcttccagaaagtgctggtaggaccgacctcaccggaagagaccttgcagattctccggaacatcaaggataaatacgaggaacaccataacgtgacatatacggacgaggcgctggaggcttgcgtacgcctgaccgaccgctatgtgaccgaccgctatttccccgacaaggccatcgacgctatggacgaagcgggttctcgcatccacctcactcacatctccgtacctcaggaaattgaggagcaggaacgattgattgaggaagcgcagcaacataagaatgaggccattcgcttgcagaacttcgagctggccgccagcttccgtgaccgtgaaaaccagtacacggagcaattggaacgcctgaaaaatgaatggaaagaaaagttgaaggacaaccgggaaacggtggacgcaccacagatagaggaagtggtgtccatgatttcgggtgtacccgtgcaacgtatggcgcaagcggaaggtgtacggttgaaggggatgaagcaggcattgctttcgaaggttatcggacaggacaaggcggtagagacactggtaagaagtatccagcggagccgtgtgggactgaaggacccgaacaagcctatcggtacgttccttttcttaggaccgacgggtgtaggaaagacgcatctggcgaaagagcttgccaagaacatgttcggtactaccgacgccattatccgtatcgatatgagcgaatacatggagaaattcaccgtgtcacgtctgatcggagctcctccgggatacgtgggctacgaagaagggggacaactgacggaaaaggtacgccgtcatccctactccatcgtattgctggatgaaatcgagaaggcccactccgacgtgttcaacatgttgttgcaagtgatggacgaaggccggttgacggatagcttaggacggaccgtagatttcaagaataccattatcatcatgacgtccaacatcggtacacgccagttgaaggagttcggcaaaggcatcggtttcacggcacagaccggcgagaacgagaaagaacatgccaatagcgtgattcgcaaggccttgaacaaatcgttcgctcccgaattcatcaaccgcctggatgaaatcgtgaccttcgaccagctggatattgcttcactggagaaaatcatcgacatcgagctggcaggactctacaagcgtatcgaaggttgtggctaccatctcctgctcgaccaggaggccaagcgtttcgtggcagaaaaaggctacgacgtacagttcggtgcccgcccgttgaaacgctccatccagaaccacctggaagacggactggcagagctgattatcaacgaagaaccgcaggcgggcgataccttgcatgtgtacatgaacgcccaaggtgacggagtagaaatgaaagtagaaaaagcataacggaattctgacagaatttcggtatacagacaaaatgtcaggtacaaacgtatctggcattttttttgtgtaaggactggaaaaaaatttattcgaacaatcataaaaaacaaagagatatgcaaaaaggtaatatcggggttacaacagaaaacatattccccatcataaagaagttcttgtatagcgaccatgaaattttcctccgtgaactggtttccaatgcggtggatgcaactcagaaattgaagacactggccgctacgggcgattttaaaggtgaactgggcgatttgacggtacgtgtaaaagtggacaaggaaaacggtaccatcaccatcagcgaccgtggtctgggtatgacggccgaagaaatcgacaagtatatcaaccagattgccttctcaggagcaaatgacttcctggaaaaatacaaggacgatgccaatgccatcatcggtcacttcggtctgggattctactcagccttcatggtagccaagacggtagatatcgtaactctttcatattcatataaggaaggtgccaaagccgtgaaatggagttgcgacggaagtcctgagtttacccttgaagaaacagaacgtagcgaccgtggaaccgacatcatcctgcacgtggatgaagattgcaaggaattcctggaagaatctcgcttgcagggcttgctcaccaagtattgtcacttcctggccgtaccggtagcctttggcaaaaagaaggaatggaaagacggcaagcaggtagaaacggatgaagacaacctgattaacgacacttgtcctatctggaccaagaaaccgtcggacttgaaggaagaggattacaagaaattctaccgcgacctgtatccgatggccgacgaaccgttgttctggattcacctgaatgtagactatccgttcaacctgaccggtgtgctctacttcccgaagatcaagagcaacatcgacttgcaacgtaacaaaattcagttgtattgcaaccaggtatatgtgaccgactcagtagaaggtatcgtgcccgacttcctgaccttgcttcacggtgtcatcgattctccggatattccgttgaacgtatctcgttcttacttgcagagcgattcgaacgtgaagaagatttctacttacatcacgaagaaggtatccgaccgcttacaatctatcttcaagaacgaccgtaaggaatttgaagagaaatgggacgacctgaagattttcatcaactacggtatgctgactcaggaagatttctatgaaaaggcttccaagtttgctttgttcaaggatacagacaacaaatattacaccttcgaagaataccagacactgatcaaggataatcagaccgacaagaacggcagcctgatttacctctatgccaacaacctggacgaacagtacacttacatcgatgcggccaagaacaaaggctacaacgtattgctcatggacggccagctggacgtaccgatgatcaacatgctggaacagaagttcgaaaagagtcacttcacccgtgtggatagcgacatcgtagaccgcctgattgtgaaggaaggccagaagggtgaagaacttccgcacgacaaacaagaagtgctcagttctttgttcaagggacagatgccgaaggtaaagaaaacagaattccacgtagaagcacacgcactgggcgaaaacaatgcgccgattgtcatcacacaggctgaatacatgcgccgtatgaaagacatggccagcatccagccgggcatgagtttctatggtgaaatgcccgatatgttcaacctggtattgaatagcgaccaccgcctgatcaagcaggtattgagcgatgccgaaacagcttgtgcggaaaaactcgtaccagtagaatctgaaatcgccatgctgactctccgtcgtaacgaactccagaaagcacaggaaggaaagaaagatgaagaaatcccgactgccgaaaaagacgaactgagtgaggtagaaaagaagattgaagcgcaaaagaccgaaaaggaaaacatcctgaacggttatgctgtcggcaacaaagtggttcaccagcttatcgacctggccttgttgcaaaacaacatgctgaagggtgaagccctgaccaactttgtaaaacgaagcgtggaaatgatctgattttcccccataaaataaggaaagccattcttgcaggtatgcaggaatggctttttttgtgctttttatgcccgtggatagaagataatttgtacatttgcccagaaacacgcaagcagacaaccatggaaaacaaaaccgaattgatattaatccgcatcagcggagtggaccgaccgggactgaccgcatcggtgactgccatcttgtctaaatatcaggtagacattatggacatcggacaagctgacattcacagtaccttgtcactgggtattcttttcaaatgttccgatcaggattccggaaatatcatgaaggaattgcttttcaaggcttctgacttgggtatcaatatccgcttctatcctatcagcgacgaagagtatgaaacgtgggtaaacctgcaaggaaagaaccgctacattctgacgctattgggcagaaaacttacggcacaacagattgccggtgctaccaagcttttagcagagcaacaactgaacatcgacggtatccgtcgtctgaccggacgtattcccctggacgagaaaaaggcaaacgtgagagcctgcatcgaattttcggtgagaggtactcccaaagaccgtgaagagctacaaagccagctcatgcagctcagtgcttcactgggcatggacttctctttccagcaagacaatatgtaccgccgtatgcgccgactcatctgctttgatatggattccaccctcattgaaacggaggtcatcgacgaactggccatacgggccggtgtgggcgaccaagtgaaagccatcacggaaagagccatgcgtggcgaaatcgacttctgcgaaagtttcaaggaacgggtagccctgctcaagggactggatgaaagcgtgatgcgcgacattgccgaacacctcccaattaccgaaggagtggaacgtctgatgttcgtcctcaaacgctacggatacaagattgccattttgtcgggaggtttcacgtatttcggcaactacctgaaagagaaattcggcattgactatgtctatgccaaccagctggaaatcgtggatggcaagctaaccggccgctatttaggtgacatcgtagacggaaaacgaaaggcggaattgctccgcctgctggcacaggtagaaaacgtggacatcgcacagacaattgccgtgggcgatggagccaacgacctgcccatgctttctacggcaggactgggaatcgccttccatgccaaaccgaaggtcgtggctaatgcgcaacaggccatcaataccatcggactggatggcgtgttgtattttttaggattcaaggattcctatctggacgaacgcggcaaattataatgacaagataacattactatatgaagttttcggaactgaacttagaagatagcgtcctcgatgccttggacgcaatgaatttccaggaatgtacgcccgtgcaggaacataccatccctgtcatcctggaagggaaagacctgattggcgtggcccagacaggtacgggaaaaacggcggcctacctgcttccggtgttgaaccagttgagcaagggaggttatccagaggatgccatcaattgtatcatcatgtcgcccacccgcgaactggccatgcagattgaccagcagatggagggtttctcctatttcatgccggtgtcaagcgtggcggtgtatggaggaaacgacggtatccgttttgagcaggaaaagaaagggctgactttgggagcggatgtagtaatcgctactccgggacgtctgatcagccacttaagcttaggttatgtggacttgtcgaaagtatctttcttcatcctcgacgaagcagaccgcatgctcgatatgggattctcggacgacatcatgcagattgtcaagtatcttcccaaggaacggcagaccattatgttctccgccaccatgccgaccaaaatccagcaactggccaagaccattcttcacgacccggtggaagtgaaactggccgtatccaagccggcggaaaaaatcattcaagccgcttacatctgctacgaggcacagaaactgggcatcatccagtcgctgttccagtcccagcaaccggagcgtgtcatcatctttgcctcttccaagctgaaggtgaaagaagtgaccaaggccctgaaacgcatgaagctgaacgtgggcgaaatgcactccgacctggagcaaagccagcgcgaagaaatcatgcatgagttccgcaaccgccgcatcgacatcctggtggctaccgacatcgtggcccgtgggatcgacatcgacgacatccgcctggtcatcaactacgacgtgccgcatgatagcgaggactacgtacaccgcatcggacgtacggcccgtgccaacaacgacggatgcgccatcacttttgtaagtgaaaccgaacagacccgtttcaagcaaatcgaaacattcttaggaaaagatatttacaaactccccgtacctgaagaactgggcgaaggtccggtatatgctccccgcacttccagaaaagaaggaggcaaacaggtgaagaatttctcccgcaacaaaaaaggcggatggaaaaagaaagggggaaaccatgcgaaaaagcagggagaaagaacggtcaagaactaaacataaaatttcctgtttttagtctcaattatactaattcatgagactaaaagcaggaaatttttactttagaaatccttttttcaaagcactcgcttaacctattattaattacatatctaattttataaatctattctctagaagcttttgcattccatactaacaatgcacaaataacagataaaagcgctgcacctatccaaaaataatttatagccgtaaaatcataaacatcttgaccatctacgatagtcttatttccttctatcaatattccactcattacatcttgaattccagcacctacataactagctataccaactacgccgagggccgcaccagaggcatttcttggtgctatatccacagccattaaccctccaaggaaacaaagaagtacacctatcccaaggccaaacattatcattgcaataacatccagccagtaatgtacaccaggaactaacaaaaatatagataaagcaccaacattaagtaacccaaatatcaatgctggaatatttcttctcccattaaacaacttatctgagatataaccagagaaagctgttccaactataccacatacagaattaactgatataataaaacttgcatcaagtgtactataacctttttgtgcttcaagataaaaaactccccaactattaactgcataacgactaatatacataaaagcacttgataaagctaatatccatatagcaggcattaatagaacttgcttttgagcctcattataatccgctgtattttcagtagtttgaactttcttaatattagaaggaagtcccttactctctggagagtcatgaaaaaaattccatataatcaaagtacctaataaaccaagcagaccagcaccccaaaatccatatctccaacctaatgcagatacaattgaagctactataataaaagtaagcgcctcacctatattatgactagcagaccaaaaaccataaaaagagcctcgttctttatcatcaaaccagcgagaaagccctacaacacaagatgcagcccccattgactgaaaccaaccacttataccccaaagtacggcaaaaagaataaaagagtttgtaaaaccaagagctaaatttacaagagaagttatcaatagtcccgttgacataaatctattgatattacttctatcagccataaaaccattggtaaattttcctattgcataagtaaaaaataatacagaacctattatacccagctctgtttctgagaatattccttcctctacaattggctttttcacaacatttaaacttaatctacatacataatacataccatagccaaatgttgctgaaagaaaagttgaccatttgtaaatccgcatcttcttttttatttcttcagacgaactataattacaagactttggtgttgagactctataaaagtctattactgattttaatatcatatttattccaattcttttaataaataatatcttaaatcactgccaggaatgtaatttaaaacttccattcctaaccgctgtgctgtatagcagttttttaatgaatcgtctacaaacaatgtttcattcacgtctattccgctatcttcaataaccattttaaatattcgttcatcaggctttgaggaatgaagcatatatgacaaatacactccatcaaatatatcgtttacatttaatccattataactaaaaactgttccagaatatctattccagtgtatagagtttgtattactaagaagatacaaattgtattttctttttaaagaaaccaataattcaagtttataaagaggtacttttccaagcattgaattccatataaaatcaatttcctcatctgtaaggtttgaagatgaacataaacgaaattcatttctaaattgtttatccgaaatcacacccatttcatgctcgagaaaaaaaccagctttatgagtactattaacttctctatttgtaaacttcacacctacttttttacactcttctataaagttttcaggcctgacatcaatcaacacatttccccaatcgaaaataatattttttattttattcatgatttttcatttaaagtcatatatttattgcctacaaaatttttagatcttgcaggcaataaatatcattgatatacatctagctatatcattcacatatatcgtcttttgtataaaagagaaaacaacataactcaattcaattatactcttctatcatttatgcaaattccgacttctcaaatatgttaacaaataagctggacgatcagtttgtatgattctacaccccaacttatctatcaaataaccataaccatcctccaaattacctaaagacatatcatcatcatgtccaccagccattgtattccacaaagtattataccaaattaacgacttaccttttaaagtctctttaattttatatgggagtttgttagaatccttttcaaaaagcagctcaaaagctacaggagataaatcagaaacaaacttattaatttctatttcagcattctgattgtctaaatctacaatcggcatataaattacatcccttaaataatgcccatacaaagatttaacttctttcacagattttctccccttcataataacctgttttgtagtacctgtcttttctaataaaggtacaaccatatcaaaatatcggtctgctttatcaagattaaccaatattttaccttttacaagaagtaaagcttcttccaaagttggaattttatgaattgttttaatagcacaaccatttcttaaatttaatttacgaatttcatctaaagtatatttgctaacgtttcctttacctgtagttgtacggtctaatgtattatcatgcattaaaattaaaacactatcttttgtacattgcaagtctaactcaacaatatctactcccatttctattgcactattaataccttctaaagaattttcaggatagtttctccaatcaccacgatgggcagctactaaaacagtgctttcatcacaagtctgtaattttgtcaatatattatcaacatttgtctgtgcaaacaattgacttgaaaacagaataataaatatcaagattgtatttttcataatttagtcctttaattataaaattagggtatttaaataccctaattttatttttacatattaataatttatccaataatgtatccttcgttctgccaatcagatttatcattgacattttcaatttcagtttgaggaataggatacaaaactctatatgaatcaacacctacaaaaacttcattaaaaatatttgtacgaacaatgtcaaaccatctatcacattccaaagctaattctaaacgtcgttctttatgaatcgcttttctaagactttcctttgatacaaaatcagataattctttatcaggtagtcctgcattattacgtactgcattcaatgcatctaaagcaccttgagtaggcgattgagataattcatttaacgcttctgcatacattaacattacatcagcacaacgcaacaccggaaaatcagaacttgtttcattatttgtagcaggagtatcaaactttcccggtctctcaccgctaccagtaggagccaaaagaaactttctattatcattatcactttcaaactcactttgcggtaaagatattacattaccattatcattattacgataacgattgttctgatgaacagactcacctatgccgcctttcaaatattgaaccgcaaaaataatatccttactagtcttaagattgtttggaaaagtttcaggtgttggaactaaactcaattctttaccttcttttataacagaaacaataggggtaagttcttcatatactttatcataattctccatatataaataaactttagccaataaagcacatgctgcataagacgttacccttcctttctcctcatcaggccattcgcttggtaatgattttgcaacattcaagtcttcaatgatttgattataaataactgatacctcttcacgcttattgttccttgcatcttctactgtttgcggctctgttaccaatggaacctttccccataatcttactaaattaaaataagataaagccctaacaaacgatacctgtcctactatttcattatatttatcctctgtcattttcacggattctacattatgaaggacaagattacaacgataaattgttttataaagtgaactccatgcatctgataaatttgtattagcaggagtttctgtaaaaacttctatctgatacctgacaccacctccagcaccagaattatcatccattacattgtcacctctaatttccatcaatgtcataaaattaccaccatactgactactagattgaagttcgtcatacactcctatcacagcaccttccaaaccttttacatcattataaaatgtttcttcagtagggaaatctataggtttcaaatccaaaaaatcattgcaaccagtcattatcaaaccggcaaaaacatatgatataattcgtttcatatttctaaataattaaatattaattaaaatgtaaggttaactccaagagaaattgttctggccaatggatatactccataatcttctccattagttgttacagaatttctattagaaacttctggattatatccttcataacgagtaaatgtaaatggattttgtatagaacaataaatacgagcagcttgtaaacaaaccttatttaccagactcatagggaatgtatatcctaaagatatattttttattcttaaataagatccatcttcaacgtgccatgtagaagttgttccattctgtcctttacttacacgattagcacgaacattcataccacttcctggattatcttcagacttccaccgatccaatgctcctttataattgttcatattcccttcatgattataaaaataacgtcgagacaaattcaatatttcatttccataaacaccttggaaaataactcccaaatctattcctttccatgcaatattagcaccgaatccataagcgaaatcaggcatataattcccgactatagctctgtcggtatctgaaatatccaaaataccatcaccattaacatccttaaatttaaaatcaccaggttttgtatcagctaaaccataatttgaaggagagtcaacataatgcaatgaagcatctacttccgcctgatttttataaacaccttctactactggtaaataatatgaaccgattggttcccctaccctagttataaaataagcattacctacagatccagaagatattatatctgcattacctggtccaagtgcttttacctcatttatattctttgagatattaaaatatgcactccaagtaacatctcccatctgatggttagttgaaatattaaattcaatacctttattatttactttacctatattctctaatcttgtagtataaccagtagtcattggaactggaacattcaacaatagatcataagtattactattatacaaatcaagacctaatgttaagcgatttttaaataatgtagcatcaaaaccgacattaacttgagctgtcttttcccatttcaaatcaggattaggcatactcttcggagcagcacctttaattgcatctggacttgaacctcccaaaacatagctatagtaagccaactctccttgtgctccataattaggtatattaaaattaccagtcaaaccataacttgctcttaactttaaatcatcaataaattcaagcgaattcataaatttttcttctgaaatacgccatccaagagaaacggaagggaaatatccccaacgattatttttaccaaaccgtgaagcgccatcagcacgtaaagcccctgttatcatatatttacccaaataattatattgtatacgtgctagggcagacaataaagaccattctgaagcattggaattacctcttgttacggttcctgcattaagcgtaggtatagaatttataataaaaccgtttgcaaaagcataattactttcgtctctttgatactgcattgtccaacctcctagtacagacactgaatgtcctccaaaatttttattataagatagtgtctgttcaaaaacccagttatatatacggctggtctgtgatgtagcttctggtatagactctggatttccttttgtattagacaatgggatagtagaaggtctgaatgtatcttccgaatcattataaagatccactccaaaatttgccctatatttcaaagagggaaggaaagcaacctcaccataaatatttccaaaaatccttgacgccttcttttcatccttctgaagcattgccaaagctacaggattccaaacctgagtctgactatttcctcgttttatacttccatcatccataattgtttcagtatcagcactccatgaattttgtgcaaaacaaaaactgccatcatcattgtaaacaggaaagatcggggaactatgcagagcagaagctaccacacctcccccattactattataagccccatcagaatttactttattttctatagtcaaagatggatttaaagtaataccgaatttaaaaataccttccgatacatccaaattcaatcgagcaccataacgtttaaaatcactattaataatgataccatcttgatttaaataatccaacgaaacataatatttaatcttatcgctacccccagaagcagaaactgtatgattctgcataccagctgtacgatatatttcatcctgccaatcagtattggttaatcctggtgttccattcagatatggaataagctccattggaactatcgtattataatcatttccagaattcttcaagcgcaatgcattattatccgatatactaaatggtaacggagaattacctgccgcaatacgcttacgatttatagattccattttatcaacataagtattattacgagcatcataggcaagttccgcatattcataagcatccagcatatctatcttctttgatacactttgccatgcataatatcccccataagttacagtagtcttaccactagtaccctttttagtcgtgatcaaaacaactccatttgagcctcttgaaccataaattgcagcagaagatgcatctttcaatacttcaatgctttcaacatcattcatattaaaagtattcaattggtcttttgctaaaggtacaccatccacaacgtaaagaggcgatgtgccggctgtaattgttcccgtaccacgaacttttatttgtaaagaagaacccggagcacctgttccttgagtaatctgtacacccggcatcttaccagccattgcttcagccatagaactcacaggctgacctttcaaatcgctagcacgaacacttgctatagaagttgtcacatctcgtttacgctgagttccatatcctacaaccacaacctcatccaatatttctgtatcctctttcaatgttactgctaaaagttttccagagattgccttaatttgctgactttggtatcccacataagaaatttccaggttagcaccatctgttgcatcaagagaaaaatttccatcgaaatcggtaattgttcctgttgcagtaccttttaccattactgtagcaccaataatcggctcacctttcgtgtccttcacggttccttcgatctttcttactgtacctttctgaacgggagtaattactatatatccatcattaattttataagtacaatcagttcctacaaggattgcatcgagcactttcagtacatctacatttttctgattaagaataacaatcttgtttacatcaagctgagttgcgttatacgcaattttgtactttgacacagattctattttttgaaaagcttgtttcaatgatacttgttctccattgaaagaaactttctgtgcattgacagatatactacctgccagcatcaggccaactccaaaggttaatgctttgttgattttcatgttcatctcatattagattaaataatttaatacatctgttttgtacgtacataaggaagacaatgtaaatgcatagtacacccaatgaatttgtattaataaaagttaaaggtgtacagaagtagaatccatatacactcccgtacacctttattgtttttaaggtcctaaattcaatctattttttcactaagagcaagaatgctttatcttaccccaaatagacatcaaagaaattcaatgtatcacctataataatagttacactttaaattaccattcagataaaagtcgataatattcttataatacaaaatatcaatgtttttcattcaatataaacttctttacctgaaattctataatcaagttccggaatcattagcttaagaatatggaatacatcttcaagagattcgtgcttattgtagtgtacgtatattttctgcttgttatatacggaagtacgtatatgcacttttaccccgtatgtcctttcgataatctgcatcgcatattcaaagtctgtattattaaagaacaagcctcccatacgccaatcggaataatcagatgcttttactttgacacattccactttatttgtagaaggaatataaaccagctgatcatcaggtttcaaataatatgatatagtagtatcattcagaagacttactttcaaggcccctgtttcaagggtagttttgacttgcttatcatcagggtaggccgatacattaaatgtagtacctagtactcgcattttgaggaaacgtgtatttacaacaaacggatgctctgcatcttttgtcacctcaaaaaatccctccccattaagatatactcctctttcagccatggtaaaagtagaagggtatataagtgtactaccagaattaagccagactttacttccatctggcaatgttacctgctctcgtctgcccaattcggcataatactgaacatacgatatttcaggttcaccaacttcatcagaattaatactgcttataaaaaaatatcctgaagtacacatcattataaatggtatcagccatacagcagcaattctaacccaatattgaatagagtgaagacgagcattcttattgcttttcttatgcattacagattcaatccgattatacgacacttcccagtcttcagacgtatccatatctatttcatcccacaactgtttcaacgctttatccctttcagaatcatcacgtggattagaaagtctttgatatacacgtgatttcaagttttccgggatatcgtgcttaaaaaaataatcaagtatttgttttatataactcataatttatctttatatacttctttctcattttagacagacaaactctatgttacccctactccattaacattatatatgttataacgataaaaccaataacattccttaattctttcaatgccaaattaagatgattctctacagtttttttctgtattcccaacttcacagcaatttcatcgtttgtcaaaccttcttgacggctcaaatgaaatatttgtttacgctgtggaggcatttcacttactgtcaagtctacaagcagttttaaatcattcgccactatttcatcataaggagtggttgtatcactaacatctggcacatcatctatctctacaggaataatatgacgagcttctatataattgaatatagtatattttgataaggtaaacatataagaatcaaaattattgacagaagcaaaagcttctttcttttcccacagttttatgaaaatcatttgagtaagttcttctgcctcgtctctgtcttttaaaaaaccatatgaaaaggatttgacttttgaataatatgtacggaagatatgcctgaaagccttttcatcaccttctgacaatctgagcaatatttctttttcgttttccatacctatgtttgtaccagattaagttgttttttaattcgagcctaaatatagaatcatgccagcagaattaaaattgtaaaatatctatatgcaaaaaagtccacaaatattgatattcagtagattaaagctattcaaactttaacaaacaatatcgtatatacaaattatatgcaatattcgtaaaattcatcaagatatgcaaacaaacagctggcaatttaaataagttattgtaaacactaaagttcaattaaatctgtctgaaacaatcaatatctgacaaaaatatcatgttaggttgaacaaaagcatagaacagacagcattacaaaataagagacctattggcagaattaaatatacgttataaattccaccaataggcccatatcatgttttttactataacatgccgactattcgccttcgcccatacaagttacagctcttgaaaaaattaatctttaaacttatacttttattgccatttttgctctatagtcttactccctcttggtagtaataagaattacgccaaattttcctttcttaccatattttgcggtagcggcttcattcttcagcacactgacggattgtatcttgttcggattgagcttctttatcacatcgtcagacacttccagcccgtccataatgacaagcggagacactccggaggctttggaactacccactgaatctattttgaaatctcctgtaatggacaattcatccataggattatggagtttaatagtaggcacatctactgattcctcgcttttctggactccataccccactactacgacatcattgtcgcctgacttcggcttgttgttggttccctccagcatgaaagtcaccgggagagtaaatttcacgctgaccggctttccgtcctgcatacccggcttccatttcggcatggtgctgattacgcggatagcttctgcatccaaccacgggtcgaccggacagagcaccttgaaatcgctcagtgaaccgtctttccttaccacaaactgcacgatgacacgcccctgcttaccggcttcccgtgcctttgtaggatacctgagattgcgtgccataaattccagaccagcacgcataccgcccggatattcgggcatctgctccactacgctaaacgtctggtcgtccgacaccacagtttgcggagcagatgctaccaccttcacatatttctttgtgtcgctttcagtcaagacaattgtctggtcggctttcttcagacagtctttgaccgacatggtaaccgtactcataccgatgtaggccacctggatgctttggtcgctgccgacttccagcgtgaaattaccgttttcgtcggtaagggtaccgttggtcgtattcgccacaagtacagttgccgcgataatgggttttccctcctcatccaccaccttcatcttcagtttggtcttttcggcagggttcgacacatttttatcggcatacgtttccagaactgccgataaatcattaactttgacacttgaaatctcatcgagaggtttggagatttcaggacgggcaaaagcagctacggtaacggctgctaacggaagtacataaaggtacttggcacgtgcccacggattggatttttttcgaatcatcatagtgatacgttttttaagtgaactgtgattaaagctgttggcaatagagtagagccttgcgccaacggctttttttattaatagcatttgatattctttcgcgttgattccctgacggagcacttcttcgtcggcttcgtattcatgaatgttctgcaactcctgtttgagcagccagatggccggattgaaccattgcagccaggcacaggcttcggtcagcaacaaatcccatgagtgacggtgatggatgtgagccatttcgtgcaccagaatgtgatgtccgctttccttcaggtccgtttccgaaatcacgatgtagcgcatccagctgaaaggagccagtttgcgacggtggactaccaagcggataccattgtccaacctttcacaccggctgtgacgaatgagataaagcatgcgtcccagcgaccagaggtgacggacgatgacaaaaaacaaccccacaaaatagactaacaccagcccttcctgccagtggaacggacgacttccctcttccaccaccgcttcgctattccattggtacatcagcagcaagtcttccatcgacatcacttgtgcatttaccggcgaagcctgttccaccgtcacctttaccaaaggcagcagacacgagagcagcatcactcccagcaaagccatccggttaaaacggtggaaagtttctttgctgagcagcaggcgatagaacagatagaacatcgccaggcagacagccgacttgagtatatagactaaaaaggttcccataggcagacgtgttttattgtggtttctcgttctgcccctcttccacctgacggatgagttctttgagttcttccactgaaatgtcttcctctttcaccagcgaggaaacagcacctaaaaaagagttgttgaaatatttggagatgaccccacgcagagttttccgccggaattcctcttccgacactatagcatgatactggtaggtattaccgaacgcggtatgcgacaggtaccccttttcttccagtccccttacaatggtcgacagggtattgaagtgcggccggggctcttcgtaaagttccaccagctgtttgacgaacatcggacctttctcccagaaaaatcccatgatttcttcttctttggcagtaagtgttttcatatccgtttcaattggttactgcaaagaactaaaatttttagttgacaaactaatttttatagttaatataactaaagaacatagtttttcatagcggcttcctatgacaagatagcggaaacatctgattaagaaggagaaaaaacaatctacatttctcattctccataggatttgaaatatgatgaccttaaaattgagggggaagatgcttacgatgtccgggagcatcaaactttgcagattttttaccacgtatttttttcgcatggccaggaggaatctccttcttatgtggtggcttaggtgcatgacgatgcaccacacaagagcttccgcccaaacacaaaagcaggccgaacagggcaatcaacaattttgttttcataactttcaatggtttttacaaagttaaaaaaagacacagacatattcccctgcaaacctccccaattgcagaaaataaaagcactctcaactctttaaaaaacgcaagtgcattcaacccaaaacacaagtgcgtttgaatcaaaacgcaagtgcgtttaaactaaaacacaagtgcatttgagtcaaaacgtaagtgcgtttaaactaaaacacaagtgcgtttttttcacaaagatacgcaagtgcaaaaagatgtaaaatcagtaagcagaagcgtgtggaaaagccttaaagcaaagacttcaagcaataataaggaagaatggaagaaaaaccatacttacctgatttacaaacattaaactgccaaatgagcataaaccaacagcggaaagcttgacgggttgacgggttggcaccggtttttcaaacttcctatatacaggtgtggaataactcttaagagttgttccacaccccgcgtatatatagtttataaaaatgcctgccaaccccgacaacccgtcaagcacacggccgaaaacggacaataaaaaacctccttcacttcatcttttcagaagcaaaggaggctttcaaatttccgtattcatttagaacggcaggtcgtctttctcgtctgtcatggagaagtcggccggagctgcatttaccggagggaatggagcttctaccggaggcatctgaggagtggctcccacacgttccaccttccatgcacggatactgttgaaccagcgtccttgccattcgcgggcatcaatgtcgaacgatacgttcaattcctcgcccacctgaatattaaactgtttgattttgtcgtcaccaaagacatcaaagcacatgcgacgcggatactggtcgtgtgtttcgatgacatattcttgtaccttccattcgttgccgttccgcgatgtaccgcctttcggttccagaaccgcaatcactcttcctgctaattccataaatagtatttttaaattcggtgacgaaattacgactttccatagaagaaaactaatttttaagacctttttttgtggggcgtatgcaatcttttcgtaactttggcaattggtttagagcatccgtagatgcatttaataataaaaacagaacaaaaacaaatataaaaacagctatgaagtttatcgtttcaagtactgctttattcagtcatttgcaggctatcagccgagtaatcaactcaagaaattcattacctattctggactgtttcctcttcgaactgagagacggtacactctttatgactgcttcggacaatgacactacgctgtctacttccatcgaagtgaacgaatcggacagcgacggccgttttgccgtttcttccaagacattgctggaagcattgaaagagattcctgagcagccgctgagtttccacatcgaacccagcaacatggaaatcaccgtggaatacctgaatggaaaatacagtctgatgggacagaatgccgacgaatacccgcaggcacaggcgttgggaagcaatgccgtacaggtgaccatgggagcagaaatcttgatgaacggcgtgaaccgcagcatttttgcgacagccgacgacgaacttcgtccggtgatgaacggtatttatttcgacatcagcacagaagacattacactggttgcttctgacggtcataagctggtacgttgcaagacttatgccgcacggggagcagagaaagctgccttcatccttccgaagaagccggccaacctgctgaagaacctgctgccgaaagaacagggcgacgtacaaattggttttgacgaccgcaatgccatgttcaccctcgaaaactatcagatgatctgccgtctgattgaaggacgttatccgaactataactctgtcattccgcagaacaacccgcaccgtgccatcattgaccgtgcgctcttcatcagtgccctgcgccgtgtgtctgtgttctcttcacagtcaagcagtctgatcaaactgagcttgtcggaaaaccagatgaagatttctgcacaggacatcgacttctctacttcggccgaagaaaccatcgcttgccagtatggcggcaacccgatgagcatcggtttcaagtcgtcattcctgattgacatcctaaacaacatttctgcacagaacatcatcatcgaactggccgacccgtcacgcgctggtgtcatcgtgcctgaagaacaggaggaagacgaagacctgctgatgctgctgatgccgatgatgctgaacgactaatcattttttgttacacacagactcatgaaactgaacttgaaaaatccgctcgtgttcttcgacctggagaccacgggcaccaacattaatacagaccgtattgtagaaatctgctacttgaaggtttatcctaacggtaacgaagaggccaagaccttgcgcatcaacccggaaatgcacattccggaggcatcgactgccattcatggcattcacgacgaggatgtggccgactgccctactttcaaggaagtggcaaaggacattgcccgcgacattgaaggggccgacattgccggttttaactccaaccgttttgacgtgccggtactggtagaggaatttctccgtgctggtatcgacatcgacctgaccaagcggaagtttgtcgacgtgcaggtgatttaccacaagctggaacagcgcacgctttcggctgcctacaagttctactgcggaaagaacctggaagacgcgcacacggcagaagccgatacacgggctacctacgaggtgctgaaggcacagctcgaccattatcctgatgtgctccagaacgacatcaactacctgtcggaatattccagctacagcaagaacgtggactttgccggaagaatcgtgtatgacgacaacggcgtggaagtgttcaacttcggaaaatacaaaggtattccggtgtcggaagtgctcaagaaagatctgggctactatggctggattatgaacggagacttcacgctgaacacgaagaatgtattgacaaaaatccgcctgcgcgaaacggggctggtcaagtaaacggaaagtagcatgaatacactacaaggcaaaaaaattgtactgggtatcacgggtagcattgcggcctacaaggcggccgtgctgacacgcggactgattaagaaaggcgcagaggtgcagattgtcatcacgccggcaggaaaggagttcatcactcccatcacgctgtcggcgctgaccagcaagcctgtcatcagcgagttcttctcacagcgtgacggcacatggcacagccacgtggacttgggattatgggctgacgccatggtcattgccccggctacggctgctaccatcggaaagatggcacacggagtagccgacaacatgctggtgacgacttacctgtcgatgaaggctccggtgtttgtggctccggccatggacctggatatgtttgcccatccttctacccagcataacctcgacattctgcgcagctatggcaatcatattatcgaacctgcttcaggcgagctggccagccatctggtaggaaaaggacgcatggaagagcctgagaaaatcatcgaagtgctggaatcgttctttgcccgtcagcaggacttggccggacggaaaatcgtcattaccgcaggtcctacttatgagaaaattgacccagtgcgctttatcggcaattactcttccggaaagatgggttatgccctggccgaagcgtgtgcttcacgcggagcggaagtggtattggtgagcggtccggttaccctgcagacggttcatccgaacattcagcgcatagacgtggagagtgcggccgaaatgcaccgcgcagctgccgatgccttcaaggatgcagacgcaggaatcttgtgtgcggccgtagcggacttcacaccggagcaggtggccgaccagaaaatcaaacgggaaaaggacgacctggtgctgcggttgaaaccgacttgcgacattgccgcttccttaggaaaggaaaaacgtccggaccagttgttagtgggattcgcattggagacttgcgatgaggtaagccacgcccaggataagctggcacgcaagaactttgacttcatcgtgctgaactcgctgaatgacaaaggagccggtttccgttgcgacaccaacaagatcacgattatagaccgtactgaggctgtttcctacccgttaaagcgcaagcaggaagtggccgaagacattgtggataaactttccagtctgtttcattcctaaaccgttatgctacagtctatctttatacagaactatgccctgattgataagctggacattgactttacgtccggcttttcggtgattaccggtgagaccggtgccggaaagtccattatcttaggggccatcggactcttattaggacagcgtgccgacgtgaaatccatcaagaagggggcttccaagtgtatcgtggaggcgactttccggattgccaactacggcatggaaccgttctttcaggagaatgacatcgaattcgaaccggacgaatgtatccttcgccgtgaagtgtcggccaacgggaagagccgtgctttcatcaacgatacgccggcttcgctggcacagatgaaaatgctgggcgagaaactgattgacgtgcacagccagcaccagaacctgctgctgaacaaggaaggtttccagttgaacattctggacatcctggcacaagacgagcaggcattgtcggcttatcagtcggtatacctttcctataagaaggtggcaaaggaactggatgacttcattgcacaggccgaaaagagccgtcaggatgaagattatatccgctttcagctggaacagttggaagaagccggactgaaagacggagagcagacggaactggagcaggaagcggaaaccctgagccatgccgaagacatcaaggccggactctataaagccagccagctgattaacggcgaggaaggcggtacggtttcactgaccaaggagtgcatgcaaacgcttcagagcctgacacaggtatatgcgccggctaaggaatggatggaacggctgaacagctgctacattgaactgaaagatatttcccgcgaaatcggcaatgcggaggaagaagtggaattcaatccggcacgtctggattttgtcaacgaacggttgaacctgatttattccttgcagcagaaacaccgcgtgcagtcggtagaagaactgattgaactgacggaaaactatcgaagccagttgaatgccatcacttctttcgacgaccggattgcagagctggagggagaaaagaagaaattgtatgccgaggtgctacgtcaggccgaaaaactgaccgcgcttcgtacacagtcggcacggcacattgaatcgcagatggagtccctgctcatcccactgggtatgcctaacgtgcgttttgccgtggaactgactcccagaaaggaacccgacagcaagggaatggacagcgtgacgttcctgttctcggccaacaagaacggaacgttgcagaatgtggcttccatcgcttcgggaggtgaaatcgcccgcgtcatgctttcactcaaggccatgattgccggagccgtcagactgccgaccatcatcttcgatgaaattgataccggtgtgtcaggctccatcgcagagaaaatggcactgatcatgcaggacatgggacgccagaaccgccaggttatcagcatcacccacctgccccagattgccgcacgcggaattgcgcactacaaggtgtacaaggaagataccgacaccgggaccaacagtcatatccgccgcctgacggatgaagagcgggtgcaggagattgcccacatgctcagcggtgccaccctgacagaggctgccgtgcagaacgcccgtgccctgttaggctttaaacaataacaagaaacaaacaagaccatgatagaaaagaacgaaatgattttcggcgtacgcgccgttatcgaggctatccaggccggaaaagaaattgacaaagtattaatcaagaaagacatccagagcgacttgtcgaaggagcttttcgccgtgttgaaagatacgttcatccccgtgcagcgtgtaccggtggaacgcatcaaccgcatcaccaagaagaaccatcagggagtggtggcatttatctcgcccatcacttaccagcgtacggaagacatcgtgcctttcttgtttgagcagggaaagaacccgctgctcatcttgctggacggcctgaccgatgtgcgcaacttcggagccattgcccgtacgtgtgaatgtgccggtgtggatgccatcatcattccgtcaaaaaacagtgtcagtgtcaatgcggatgccatcaagacttctgccggagccttgcataccatcccggtgtgccgcgaaaacaacctgacgaataccatcaagttcttaaaggacagcggattcaagattgtagcagcgacagaaaaaggtgactacgactacaccaaggccgattatcagggcccgacatgtatcatcatgggtgcggaagataccggtgtgccctacgaccacctggcactttgcgatgaatggatcaagattccgttgttcggcaacatcgagtcactgaacgtgtccgtggcagcaggtatcctcatttatgaagccgtgaaacaaagaggattcggagaagaataaaacaataaaacatacatactaccatgaaaataggaaaaattaccctcgtgctgacatgctgtgggatggcttttcagatcggtatggctcaggaacttcccaaatgggccaacaaagccagaaaagctgtgttctctgtcatcacgtacaataaggagaatcagattctcaataccggaaacggattctacattgatgaaaacggtacggccgtatccgattatacgctgtttaaaggggccgaacgtgccgtagtcgtaactgccgatggaaaggaacttccggtggaatacattctgggagccaacgatatgtacgacgtagtgaagttcaagactgcagccgataagaagaccgtagccttgcagccggcatcccgtccgggagcagtaagcgaaacggtgtacgtacttccctactctacacagaaagcggcttcgggcacacacggcaccatttcaaaaatcgataccatcagcaacaactctttctattataccctggacatgaaaacgggagaaaagaccgtaagctgtccggtaatgaatgcggaaggagaagttgtggcactggtacagaagaacagtgacaaggaaagcacatcaagctatgccatcggaataggctatgctaagagcctgtctatcaccgctctttctgccaacgattttacactgaataccatcggtatcaagaaaggattgccggaagacgagtctcaggcactggtgtacctgtacatgtcttcttccaacctgcctacagaagaatacctgaacctgctgaatgagtttatccagcagtatccgaaaaacagtgaaggttattcccgccgtgctctttgttacatgggatacggtgacgatgcacactatgcactggcagaaaaagacctgcaaaccatggtggaagtgaacgaaaacaagggagacgcgtactacagcctctccaaactgttgtataactatgtactgagcttgcagggagccaaaccgtatggcgactggaccatggagcgggcactgaaagaaatcaatacggctttggagaacgacaagcagggactgtactatcagctgcagggagacatttattttgccatgcagaaatatccggaagcatttgccagctacgaagaggtaaaccgttcaccgttagcctctgccgcttctttctatgccgcagccaagaccaaagagctgattgaaggtgcttcaaagaaggaagccattgccctgatggacagtgccgtagcgaaatacaatcccccctacggaaaagaagcagctccttatctgtacgaacgtgcccgcatgaaagcggaagacaagcagttccgcgaagcagtggtagactacaatctgttccacgacgccatgatgggccaggtatcgtctgatttctattttatccgtgagcaggctgaaatgcaatgccgtatgtaccagcaggccatcaatgacatcaacaaggccattgaaatggaaccgaagaacgtggaatactgggtagaaaaaggaagcgtacatttgcgggtaaaccagccggatgatgccatgaaagccttgaataaagccattgaactggacgcgaagaacgcagctgcctatcgtatgctgggttactgccagatacagcagggaaagaagaaggaaggtatggccaacctggaaaaagcagtagaactgggtgataccgtagccaagaacctgattgagaaatataaaaaataactgactgatatgcagaacagagtctgtcaccttttcggcatccgctaccccatcattcaaggtggaatggtatggtgtagcggatggagactggcctcagccgtgagcaacgcaggtggattggggttgttgggggctggttccatgcacccgggaaccctgcgtgaacacatccgtaagtgtaaggcggctaccgaccaacctttcggagtcaatgtgccgctgatgtatccggagattgaaaccctcatggaaatcattcaggaagaaggcgtaaaaatcgtgtttacatctgcgggaaatcccaagacatggacttccaagctccagcaggcgggcatcaaggtggctcacgtggtatcttccagccgttttgccatgaaatgtgaagaagctggagtagatgccattgtggcagagggctttgaagcaggcggacacaacggacgagaggaaactacgactttctgtctgattccggccgtcaaaaaggtgtgcagtgtacctcttattgccgcaggaggaattgtatcgggcgaaggcatcttagccgccgaagcgttaggcgcagaaggggtacagatgggtacccgatttgccttgacagaagaaagttcagcgcatttcaatttcaaggaccgttgcctgcgattgaatgaaggagatacccttctgacactcaagcagctttcccctacccgtctggtgaagaacgatttctacaagcagatagaggaagcggaacaaaaaggagcctcagcagacgaactgaaggctttgttgggaaaaggccgggccaaaaagggaatcttcgaaggcgacctctacgaaggagaactggaaataggacaagccgcatcccagcttcgcaagttacagacggtggatgaggtgatgaaagagctggtagaagactaccggacagcacttcgccagatgcaggacaaacagagctggtaactcttttgcatactaagaccgtaagctcttacctacagacttttttcaagttcaataaatatcctttaaaataaaatggcaaatgaagatgacagcgtaaaatcatcttcatttgccatttttatatgggtttctgtatctgatttcatttttcatattcccggagaaacgcttgaacatggtttctacccgaaataaaacacagatgtgctttctcgcagaaaagaatctgtgtccaccagaatcagcttctttatttattacgtttcaaaaacaaagaattcgtaatggtagcgggcagttcctcctgatagtgggttaccataatcagggttttatccttccgcgcacagaatgcctcgatgacatccttcaccagccggcggttacgcatatccagtccgtgcaacggctcgtccagaatcagtagttccgggtctttgacaaacgcacgggccagcagcaccatacgctgttccccgctggagagttgcaggaaactacggtctttcaagtcggcaatgccgaaaatatccatccaccacacgcacgtatccacatctttctcctgtgtcttgcggtacaggccgatagaatcatgtaatccgctggctacaatgtcaatggccggcaagttcttcagataagcgcggtgcatttcgggactcacataaccgatgtgcttcttgatttcccagatactctcgccacttccccgtttacgaccaaacaaagaaatatcgcaggcatagctttgcggattgtcggcgcagatcaggctcagcaaggtagacttcccagctccgttttcgccactgagcgcccacttttcgccacatttcaccgtccagtcgaattctttcagaatcacccgttctccgtaacggatacttactttgttcaagtctacgatatgctccgtatggaacaggttatcggcatacggcaagtccagtatccgctgccgtttctcgtcagacaacacatgagcagggtctggttcacggtgtgccagatattcctgcaaagtgattttcggcccgcaatgacggtcttccaccggtatcacatgtgttataaatgtcgggatatcgtctgtcttcgacaagaccaaaattatctgcaggttggtcatttcagtcagttttcccagcaatgtgtgcagcagtccccgagtccgcgcatccagtccgatgaaaggattgtccataatcagtactctcggaccactcaacaaggtcttggtcagctgaaacttgcggagctccccgctcgacagcagaattatatgtttgcttagcatttcctcaataccaaacaaatcgtacagcgctttccgcagttgttcgtccttgcagggaggaagcaaatcggctacgataggcgtatcgtccaggtcctgcgaattccagcgctgctggtaataatagttcccgtcggcatccccgtacgagtcacggaaggtgatgtatttgatgttgtcacaagccatcttcgattccgaaggcgagaagtcgtatttcacttcattcatcagcaacggatagcgtccggtaatagtgtctaccagcagactttttccgccaccgttcggtcccacgatggccacatgttctcctgccgcaatctgcaagttcacaggctctttcatccggtacaacggatgacgagtcactccgttctcaattgtaattacatgctgcattgtctttctctgtttttattttgttcctttaagtagttgttctcttggtttattgatgcacaatcatggccgtacgaggcactaccaccagtttgttgccggtcagcgtacccagtcccagcacattgtctatgcgtccgtcacgacaggctatccagtaacgtccctcaggtacgtcaatctgcacgggttccgtacgggcattgagcaccacaatcgtattcagccatgaatcacccgccggacttcccttgatacggaaagccaccacgttgcttgccggtaccggcaaaaactccaggtgtttggcaatcaagtccgcatcgcccatacggaaagaaggatgcgcctttcgcatggcaatcaggcccctcacataatcaaagaaatcacgctgcgaagtcttccgcccccagttgatggcattgattgcatccggactcttgtatgaattggccactccctgcttgtcgcgcagaatctcgtcacctgcataccagaacggaatgccctgcgaagtgaatactgccgtagcagccagtttggccaaggcgttcatctctaatgcagaaagtcccggcaatgtcgctttcagacggtcggccagacaaaggtcatcgtgacagctcacataactgatcatctgttcgggttgcgcagcccagaaagccggaacggtggattccttgtcgctgaccagttgcggatgtgcgattcctcccgccagtccgaacttcacaccggcggcgtatcccatgcgtccgatgacaaaagctcccttggcatcgtttccccacggaccacgcaggctgtcgcgcatttcatcgcagaacatgccgatgtgtggtaactgggctgcatgcttcttcatggccagcagactatccggcagttgtggttttccggctgcccagccttctccatacatgcatattgtagggtcaatcttgtcgagtgtcttacggatggcattcatggtttcgatgtcatgaatccccatcaggtcaaaacggaacccgtctatgtgatattctctggcccaatagcagactgactctatcatgaaacgccgcatcatcggtcgttcgctggccgtttcattgccacaacccgatgcgttagcccatttcccttcctcgtccgtgcgatagaaataacccggtacggtccgttcaaaattgcctcctttcgtgatagccgtgtgattatacaccacgtccatcaccacccggatacctgcccgatgaagtgccatgaccatctgcttgaactcgcggatacgcacttccggtcgataagggtcggtggcatacgagccttccggcacgttgtagttcttcgggtcatatccccagttgtactgcggtttatcaagcctggtttcgtccaccgaagaaaagtcgaacgaaggcaacagctgtacgtgtgtcacgcccaattccttcaaatggtcaatgcccgttttctcgcccagatacgtatgcgttccttcctccgtcaaagccaggaactttcctctgttccggatgccggagatggtatcgatagagaaatcgcgatggtgcagctcataaatcaccatgtcggagaagcgtttcagcggcggacgcttgtcttcgttccacccctccggattcgtctctttccagtcgatgacggctgcccggtcgccgttcactcccacagccttggccatgagtccgggcgtatctccctgccatacatcgtctatcttgacattgaacgtatagaactttcctttcaggtcttcgtccacgcgagcctgccacataccgtcagatgccggttccatcttcaccatacgataggcagaacctccctgccctttttcgtacagcagcacccgcacttcctgagccgaaggagcccaaagcgagaagcgggttgaagcaggcgtataagccatttccacccattccccctcgtacaccggatattcatcaaacggcgtactggtatgctgctgtgaagaagtacatccggtagccacagccacggccgacatcactacaagctgttttaaattcatggttctaatctcctatttctttatgcgtcccggattcttggcgataaagtccttccagctggaataagctttcggcatttccggacgtcccatctgcaaataatggcaataagctgctcccaaggcatccgtcgcatccataaaggggcccatttccgagtcgggtatgtgcagcatacgcttcaacatatcggccacctgctccttgctggcctgcccgttgccggtaatggccatcttgattttcaacggggcatattctgtcacggggatgtcacgtgtcaatgctgctacaatagccaccccctgcgcacgtcctaacttcagcatggactgtacgttctttccaaaaaacggagcttcaatagccagttcatcaggaaggtacgaagaaatgataccctgcacgcgctcataaatgtgtttcagcttcagatacgagtcgccgcatttacgcaggtcgatgacgccgagtgtcatcacttccggtttgacacccgtcaccttcagtatcccgtatcccatgatgttcgtacccgggtcgataccgagaatgattttttccttaaccggctgtatcaccttattacctccattaatgtggggaaaccgatgaccttatccttgaacactttcatcatctccgtattcaaggcagcctcctgctttacatgccagcgatgcaacgtcgcgctgtcttccacttcccactggagtgaaaagcattcactgtcctgctccttatggctcaagatacgcaggatacggggatttttcagttcacccgatttttccacttccggaatgtagaattcattcaaccatatcacaaaattacgggcatcacccatctctacatgaaaagtagtattataaatcagcatatatcttcttattttaatccgattacaaaattatacaatacgatgaaaacaacctgatcaggaataccggcgaggataacgcaacagaatgctcagcacagccgccactcccagtgccatgggataataaaggtatcctatgatgtggataggagataaacccgaaagctcggccgcaatcaagagttgcgcaccataagggataataccctgaatcacacacgaaaaggtatcgagaatactggcactcttccgtttgtctacccggaactgttcggcaatgtcatttgccaatgggcccacagtgataatggcaatcgtattattggccgtacagatattggccaggctcaccagtgcggcgatacttagttcggctcctcgttttcctcttacatgctgagtcagacggtgcagcacataatccacacctccgttaaaacgtatcagttccagcatacctcctgccatcagggttacgatgatcagttctcccatgcccgtcatccctttacccaaagccccaaaccatccgaacacatcgaatgtaccgtatgccatgcccacaatacccgtagaaaccagacccagcaacagtaccagcaatacgttgacaccagccactgccgttccaagcacaattatataaggtatgactttcatccattctacatggggaatatcctgcaccacctcaatatggcttccatatataacataatacacaaataccagcaaggcagccggaagggcaatcaatgaattcacccggaacttgtcgcgcatcacgcacccttgcgtacgggtagccgcgatggtcgtatcggaaatgaaggacaggttgtcgccgaaaaaggcaccacccactactaccgccgtcatgaaaaccacgctgacatccgtcttggccgcgataccggcagctacaggaaccagtgcgacaatggtaccgaccgacgtaccgatggaaagagaaatgaagcacgatgccaaaaagattcccgccagcagcagattgcccggaagcagccgcaaggtcaggtttaccgtcgcatcgatagcccccatggcctgagccgactgtgcaaaggcccccgccaagatgaaaatccatatcatcagcatgatgttcttgttggccgctcctgcggagtattgcaacaagcggtcgtttaagctcagtcctttcgtcgtagctacggcataaatggaagacaccatgaaagctacggtaatcggaattttataaaaatcattgatgagcagggaagccaccagatacaggcataaaaataccaccagcggactcagggcccacgcattgggtttgttcacaatgggagtcagtttctgaaaattcattctcttcttcttttatttttttgacaaaggtatatatttttcagctgacaaacatcccatttcaatgaacatttcagcaaaaaatgaggttatcagccccataattaggaagaagcaaaaaatatttcacccatcttctccgaatatttaagaatattatctatctttgccaagcctaaaagggaaaaacagaacacatgaaactgaccatgcttaaaataatgctgctgcttacggtcatctttatgaaaatagaggtgacagaagctgtgtcatgcaatcaggtgtcaaatgattttcccaatttatctacggtatcttgtcagagagagacaaaagaaacgctcaattttatccatgccacccttgacaaggcacataatttgttcagtacactaaatcgcgacaattccttcaacaggttgttgacggataagcgtgtagtacgcaatgacgaacaaaatataaacttcttcttacgcttactacttttttatcattccctacgtgaagtaggcttgttgaaggataaggagtgcctttacccttcgaccaatattcattgtgtgattccttcatgcagatactatgtatttgctatgagaaaaatcatcatttagccgttttatagattagttgtttttcactgctccgatacggttgtgccggggcagtatagctttgcttgtctcattttttttgaaataagcgaaatatcttatgtctcatttttaaaaaaatctataaaacgcataaatcatgaaaacaaatagttcaaaaaaatcatttaaaggaatagaagacgcaggtttagttatcatcgtatgttttctcgtggctataggtatctatcattttgtttttggaaatccggcaaacttcatgaacaatgacccaaacaatcatccgcttccaggcaatatgttaggtaccatctacaaaggaggaatcattgtacccgtcattcagacactcttacttacggtactggctctcagtgtagaacgtttttttacccttcgtgcatctttcggcagaagcaagctctccaaatttgtagaacagcttaaagaagccttaaataaaggaaatttggaaaaagcacaagaactatgtgacaaacagcgtggttcagtggccaatgtcgtaagttccactctccgcaaataccgtgagatggagcagaacaacgaattgagcaaagaccagaaaactcttgctatacaaaaggaactggaggaagccacagcactcgaacttcctatgatgcaacagaacctacccattatcgccacaatcaccactttaggaactttaatgggattgcttggaaccgtaatcggtatgatccgttcatttgccgcactttctgccggagggggtactgactccgtagctttgtccactggtatttccgaagctttgatcaacaccgcatttggtatcttgaccggtgcgttggcagttatttcttataactattatacgaacaagatagacaaactgacatacagtcttgacgaagttggtttttccattgtacagacttttgcagccactcattaatttctgtcccgctgaggatttcctcacgcagacagaaacagaagttccattaaaaagatttcactatgagtagagctaaaataaaaaagaaaaatatgttcatcgacatgacagccatgagcgatgtcacggtgctgctgcttacttttttcatgctgacagccagtttcgtgaaaaaagagcctgtacaggttgtcactcctgcatcaatttccgagataaagatacccgaaacgaacatcatgtccattctggtagatcccgggggcagaatctttatgagtcttgataagcagaatgacatggcagctacgctagaagctatgggaaaagagtacggcttgacatttaccccacaggaaatcaagaaattttccttattcccgacttttggagtgccgatgaaaaatatgaaatcgttccttgcccttagcacggaacagcaagaccgcatcttaaaggatcaaggaattccttgtgacagtattgacaatcagtttaaggcctgggtacgcaatgcacgtgctatcaatcatgacttgcgcattgctatcaaagccgaccagcaaacaccatacgcggtcattaaaaaagtgatgaattcccttcaagaccttaaagagaacaggtacaacctgattacctctctgaaatcaagtcctgaagaataaaaacaaaaagtatggctgaaattcaagaaaacaataataaagagaaaaaaggtagcaagcagaaaaagatgaatatccgggtggatttcaccccgatggtcgacatgaatatgctactgataactttcttcatgctgtgtacttcactgagcaaaccgcaaacaatggaaatcagcatgccttccaatgataaaaacatcaccgaagaacagcagaataaagtcaaggcttctcaagcactgactttgttgctggccgaggaaggaaaactctattattatgaaggtgaaccggattacaagaactatgcatcactaaaagaaacaacctatgatgccagcggattacgcaaactgttgctcagcaaaaactatgaagcagtcaagaaagttcgtgaactgaaggaaaaaaaggcaagacttgaaattaccgaagaggaatgcaggcaggaaatagccagtgtaaaatcaggaaaagacactcctaccgtcataatcaaagctacggacaaatctacctataaaaatctgatagacgcattagacgaaatgcaaatctgcagcatagggaaatatgtaatcgtggatattacagacggtgaccaattcctgatagacaactatctttctcaaggcgagttaagtcaaaatgcggcaggcaacaatgtataactttataaagagaaagaaaaatgtcaaaagttgatttaacttctttggaatggtgtgaactcatcttcaaagatcggaataaaagttacggtgcttataaaatgcgccgggatttggggaaacgacaggctgcagccttgattatcgtcactgttgtggctttggtcggatttaccttaccgcgtcttatcagaatggctatgccggctcaaaaagaagaaatggtagaagtgacacggctttccacactggaagagccggaaataaaagaagaaacgatgaaaaaggtagaacctatcgcccctcctcctccggctcttaaaagtaccattaagttcacggcaccagtcatcagaaaagatgaagaagtgaatgaagacgatgagctaaagagtcaggacgaactgacgcaaactaaggtacagatatccattgccgatgtgaaaggaaacgatgaactgaacggaaaagatattgccgacctgcaggaagtcattacccagacaccggaggtccaaaaagaagagccctatgacatggtagaacagatgccgcagttcccgggaggtcccgccgagcttcttaaatacatcgccaagaatctgaaatatcctatcatagcacaagaaaacggcatacaaggaaaagttatcctacgttttgtcgtcaatgcaaaaggatacgtggaagatatcaaagtgctccgttcattggatccctattgtgataaagaggccgtacgtgtagtaaaatccctgccacaatggattccagggaaacagaacggacgtaacgtacctgtttactatacatgtcccatcgtttttaagttacagtaattgtgtcaaagtgtatgaaaagtaaattaattctatatctgtggtgtatgtgcacgttctctgcctgcacttcttccggaaagggaggcaaagaggaaaccttgtattcgggagaaatccggattgccgtagatgaatcgttcaagcccatcatggaagaagaacttcaagtatatcatgctctgactccggaggctttaattactcctatttactgtagtgaggtagaagcagttaacttgctgttgaaagacagtgtacgtctggcagtcaccaaccggcggctgacagaagaagaattgatttcttttcatacacgtaaattctttccagagtccattctgatggctcttagcggagtggcactgattacacatcacagcaatccggactccctgattacagtagaagagttccggcgtattgcaaccggcgaaaccacggaatggaaaggattaaatccagactcaaaactaggttgcatacaagtcgtattcgacaatcccaattcaggaaccgtacattatgtcatcgactctatctgtcaggggaaaccactatctccctctttaaaagccctgaaaagcaacgaagaggtcattgactatgtggcaaccactcccgatgcccttggagtgatcggagccaactggataggcaacaagacggataccacacgactgtctttcaaccagagagtcagggtcatgtcagtatccggaaaccggaaagccactcctgaaaacagttacaggccgtatcaggcgtatctggctcttaaaaaatatccgctgacccatgaagtgtatatccttatcaatgacccaaagggagcacttcctaccggactgatgactttcctgacaagagaacgcggacaacggattatccttaagtccggactggtacccgccacacaaccggtccgaatcgtaaatgtaaaagatgatttctaactttaatgagaaactcatgatgaacaataaaattttatgtcttgtatgcagtggaataatatattccgcttcatacagttatgcccaaaaaaatctctcggatgaagtcacccgacaaatcacacagatagctgccagcattaatgacacaccggaaacagcagccaaggaattcaatgaactgctgaaaggtaaaaacaagaaaaacgtccctttgctggtcgctatcggtaatgcctatctgaaccataagtgtccggatgaagcacaagtttatgcagaccgtgccatgaaaatagactccaaatcggcaccggtatatgtgctggccggtgacattgctctgacacagaagaacgtcggcatggcatgcggatattatgagcaggccatcctgttcgatgccaattgctacgatgcatattacaaatatgcacacgcctatatcggcgtaagtccccaactctctatcgatatgctcacaaagctgaaagcaagtcatccggaactgccggaagtgaaccgggaacttggcaatgcgtactatcaatcggggaattacggaaaagccaagtctgcctacgatgaatttatgcaacaaggtactcctgacactcaagattacgaacactatgccatgctgctatatctaaataaagactatgcgcaatcactgaatgccgtagaaaaaggactggatgcggacaaagacaaccatctcctgaaacgtctgcgcatgtacgacttgtatgaaatggaggcttataaagaagggctggaagctgcagatgcttttttcaaccgcccggaagagagcaactatgtgtatctggactttttatacagaggccgtctgtcactggcagaccagagaaacgaagaggccttgcaatggtttgaaaaagccctcaaggcagataccggaaacacacacccggaaatagccaaggaagtgtctgccgctcatgagaaactgcagaactaccccgaggccatccgcttgtaccagctttatctggacggcctgaaagagaaggcagaaataagcgatacgttcttattgggaagattgtattacatggcagccggaagcagcacagtcagcgaaccggagaaagaaccttacctgaaaaaagcagacgaaatattcgcagaagtagcccagcgggtaccagacaattatctaggatatttctggagggcacgaaccaatgccatggccgaccctgaaagtacggaaggactggccaaaccttattatgaagcggccttgaacctgctggaaaagaaagcagacgcttctaaagcgctcataattgaatgtgaaagctacctgggttactatcacttcctacaaaaggattacgaacagtccaaagtgtactggaacaagattctcacgttagatcctgaaaatgagactgccaaacaggcactgcaaggattacaaggcaactgatttttcttcttaacctcagaaacaaactttatgaaaacgtttaatttgtctcagtcatatcccactcaggatatccggaaacacacaagtttccttaccataagtctttcagcctgtttactggcggccggtctcattctgcttttcctgccggaaatcaactcgcagtccaatattgacattttaagaatggtagccggaagtctgatggtctgcatcgcagtctatcttctggtttttcgagctcgctaccaggcttatgcagaaacaggcagcaggatatgcaagaaaagcctgactttcacaaaggatcagttcccccatttgaacaaatatctggcagattattgcagccttccggtttttccggcagaaggggcacagctatatctgcaggtaatccattcgaaagataaccgatacgctgcatttcaactgctcacctacacatctttcttgtatgaacctgtcacagaattgtgctgtctgaaaggagaaaaagcggctgcattcatcaattctctacacacttctcatggatttcatcattgatacttttttgcatatagaccagcatctgatttcactcgtacaagagtatcacggatggacgtatgccatattgtttgtaatcatattttgtgaaaccggacttgtagtcctgccatttttacccggagactcccttctgtttgtctccggtgcagtggcatcccttccggggatgccactggaaataagcctgctgatgatggttattttcatcgcagccgtgcttggtgattcctgcaactacctgattggacattatttcgggaaaaaactgttctccaaaccagactcaaagatcttcaagcaaagtcatttggagaaaacccatcatttcttccagaaatatggcggaaaaaccataatcattgcccgttttgtccccattgtccgcacttttgcaccgtttgtcgccggaatgggacacatgaattattacttgtttatgatttacaaccttgtcggggcagctgtctgggtcttacttttttgcatgacaggctatttctttggaaacatcccttttgtgcagcaaaacctcaaaatacttttgatgggcatcgtactggtttcactctgccctgccctcattgaatatatacgaataaaaaataaacgaacaacagtatgaaaaattccctgttaaaccgatttgtacccaaagaaagcaaattctttcctttattaaaccaattgtcacaaaccgtactcaatgcttctgaacttctgattgacagcatgaaccatgacacaccagagacatggcaggagtattatcacaaagtgaaggaagctgaaagaaaaggcgaccagataacccagcagattttcatggagctaggccagacctttatcaccccctttgaccgggaagacatacatgacctggccttttccattgatgacgtgaccgaccgcattcacagtgcctcgaagcggattgccatctacaagccgcacgccatttcagacagcggaaaagagctggctgtcctcatacaacaaggagcctccatcatctgcaaggccatggatgagctggaaaccttcagcaaaaatccgtccagactgaaagattactgtcagaagctccatgagatagaaaaccatgcggatgaagcctatgaccttttcatcatgcaactgtttaatgaagaaaccgactgcattgaactgatcaagacaaaagaaatcatgcaggaactggaaaagacgacagatgccgccgaccatgtaggaaagctcctgagaaacattatcgtaaaatatgcctgaaaaaagaattgcacatggaattactcatcaccatcattgtactggccctgatttttgactatatcaacggttttcatgatgcagccaacgcaatagctaccattgtttctaccaaggtgctgactccgcttcaggctgtaatctgggctgcctttttcaattttctggcgtttttcatcgctaaataccttatcggtgatttcggcattgccaacactgtgtcaaaaacagtctatgagcaatacattactttgccagtcatcttgtctggagtgattgcagccatcatctggaacctgtggacctggtggagaggaattccttcttcttcatcccatacacttatcggcgggtttgcgggagccgccattgctgcttatggatttggtgccattcaaagttcggttatcctgaaaatcgtgcttttcatttttctggctccagtcataggtatgcttgtagccttcctcttcactctgatagtgctgaatctgtgccgtaaggcccatcctcacaccgcagagaaatggtttaaaagactacagttgctctcgtccgccctgttcagcatcggacatggacttaacgactcgcaaaaggtaatgggtatcattgcagctgccctgatagcagcccattcgcaaggcattggcatgggggtaaacaacgtaggcgatttacccgactgggtcgctttttcctgctttaccgcaatctcactgggaaccatgtcgggaggatggaaaatagtccgcaccatgggaaaccggattaccagagttactccgctggaaggtgtcatagccgaaacagccggtgcatttacgctttattttacggaatatctgaaaattccggtcagcaccacccacaccatatcaggagccatcatcggagtgggcgccacccgtcgcctgtccgcagtgcgctggggagttacccgaagcctgatgacagcctgggtgcttaccatcccggtaagtgcggcattggcagcagccatctatgcactgatcgggtaaccaatctcttttttcaaggaataacaaataaggaagaaaaaatagcacaaacatcagattccagcaaaaaaaggactttcatagagataattctattaacttttattacttttgcacacattgtgtcaaacattgtgcaatttgaaaatggaaatacaagacagttttatacaacttgttgaagaaagcatccgcgccaactgggaccgtgatgcactgacagactacaaaggagctacgctgcaatataaggacgtggccagaaagatagagaaaatgcatatcctgttcgaacatgcaggaatccggaagggagataaaatcgcgctgtgcgggcgcaacagtgccaactggacggccaccttccttggcatcgtcacttacggggcagtagctgtgcccatccttcacgaattcaaggccgacaacgtacaccacattgtcaaccactcggaggcacgcatgctcttcgtaggcgaccaggtgtgggaagaatacaacgaagcggccatgcccaacctggaaggaatcatcgaactgaagaattttgacctggtagtatcacgctcggagaagctcacctatgcacgcgagcacctgaacgaggaattcgggaagaaatatccctgccgcttccgtgcagaacaggtatcctaccgccgggaagagccggaagaattagctgtcatcaactacacctcgggtactaccggctactctaaaggagtgatgctgccctaccgtagcatcatttcaaacatcgtacacattgaccagaaagtgggactgaaagcgggcgacagcatcgtgtccatgcttccgctgggacatatcttcggactggtgttcgacttcctttacggtatcaccaagggagcgcatctgtggttcctcacccgtatgccgagcccgaaaatcattgcagaatcgtttgctgtaatccgtccgcgcgtcattgcctgcgttccgctgattgtggaaaagattttcaagaagaacattctcccgaaagtggacaacaagctcggaaagctgttgctgaacttacctatcatcagcgataaaatcaaggaacagattcgtcagcaggccatggaagtgttcggtggaaactttatcgaaatcgtaatcggaggggcaccgttcaaccccgaagtggaagcctttctgcgtaaaatcaacttcccctacaccatcgcatacggtatgactgaatgtgcgccgcttatctgccacagccgctgggatgagattctgtacacttcgtgcggaaagaccgtggccaacatggaaactaaggtaatttcggaagaccctgaacggattccgggtgaactggtgtgccggggtatgaacgtcatgttaggatactacaagaacgaaagtgctaccgcacagactatcgacaaggacggctggctgcatactggcgacatggccatcaaggatgcgaatggaaacatcttcatcaagggccgttgcaagaacatgctgcttactgcttccggacagaacatctatccggaagaaattgaagctcgcctgaacaacatgccttacgtgaacgagtcgctggtgattctcaaagagaacaagctggtagcgctggtttatccggacaatgaagacgccttctcgcaaggaatgaacaagaaacagctggaggaagcgttggagttgaaccgcatcgaactgaacaaggtacttccggcttactcgcagattacgcaggtgaagctttatccggaagaatttgaaaagacagccaagaagagcatcaagcgcttcttgtaccagtaaaaaaacggacataaaaaacgcctttgcgtttgaagtaaaacgcatttgcgttttgttttaaacataaaggtgttttggcacagatatacttacacctgaaaaactgcgtttttcgcttggctctcctctcacctttcactacctttgccgcagacttaaaacgaaggaaagatgatggaatttctttacatacactggaatccggacccggcattgtttcatctcggcggttttaccctccgatggtacagcgtgctgtggatgattgccattctgaccggcagtcaggtagtctactatttgtacaagcaaaagggacttccgctggatactttccagacgctgtttacctatagttttatcggtatctttgccggggcacgcttggggcactgtctgttctatgacccgcagtatttcctgagtcatccgctggaaatcatattgccggtacatttcctgccacagggcggatgggtgtttaccggatatgccggactggccagccacggaggtacgctgggactgattctggcactagtgcttttctgcaggaaaacgaagattcattttctcgatattctggatatgatgggagtggctgctcccgtggctgccggatttatccgactggccaacttgatgaactcggaaatcatcggcatgccgtcggacgtgccttgggcgtttatcttcgaacgggtggatatgcagccccgtcatccggcgcagctctacgaagcactggcctacttcctgttcttcctgataatggtggtcatcttccggaagaagaaagaaaacgtacggaaaggcttctatttcggtttgtgcatcaccctgattttcaccttccgcttcttcgtggagttcctgaaagaaagacaggtggactttgagaatgcgctcccgatagacatgggacagattctgagcattcctttcatcgtggtaggattgtatttcgtattccgtaaaaaccattctgcccatgtgtgatacagcgacctcgcatacctgcctgctctgcatgggctccaacctggatgcccttctgcacctgaagaatgcggaagacgccttgcaacgtctcttcccggatattgaatggggaggaatcgtagaaaccgtgccggagaaaatggagaatccgcaaccgtttctgaaccgtgccgcacgtttccgcacctcactgcccatgacggaggtgcgaagcatcctgaagcaaattgagcagacaaacggacggactccggacagcaagaaggaaggacgcatcccgcttgacattgacttgctttcctacgaccagcaggtactcaaaccggaggactggcagaaagaatatgtgcgtctggcctttcgtcacgccagtttcacgtaacccagacgggtatagcgcactccatgcgactcatattgtgacatgactttggccgaaagcagatgcaggaactcctgcggctgtatctgacggctgcggcaactcaaggcgttcggtgtcagactacgggcgcgggccttgaccagaaaggtaaagcgattaccgtcgcggtcggccgccagtacattctggtcgacaaagaaatcgggtttgtacgtatctacctgaagccgcacgttcagcaccgtgacctgcaagtccttcaacgtctctcccaccgttcctacaaaatggcttaccgaagcaatgcgcggcttgcgcacggtcagttcaaaatgcaccacggcaaagcgcttggccagctccaccacccgttcgtaccgagggttggtaggttcaaacttattagccagccagagcatgtaagaaggatccacgtaatagatttcagccagatgctttcccttgtattttccgaagggcatcaaatcgtccagtgccccgtaataggactcaaactgtgcattgtcagcggtctccaaccgcacattgcagttctgcagcatggaaaaagcacgggccgaagccgcatccagcgtcactcctaacgtacggacaaacagataagaatgaggagaaggaaactcacgccacaaggcataatacggacgatattctgtggccatgctgataagatagacacccttgtcgctcgtacgtccacgattaaacagttccagttcctttagtacttgtgcggtgatttccatacctgcctcctgctttgaaaggcaagataaacaaaaagaattaaaaatgcaagtttatacatacaaaacgggaggaaaagtccccaaacaggcttctcctcccgcataatgatatggaattctaacaattaatcgttacagaatggctttcacggtttccagcatacctttttcctgaatgctgtccaggttcttcttcacggcttctgccagtcccggaatcaggttcaggtcttcgccccagataaaggtggcacccagcacgccttcggttaccttggctgtatcacccgtggcccacaactgtttcagcaggtccatgatttcctgtgcgtcattgggcacgatttctgcgccatcggcacgtacaccacctttgtagtaggtaatgatggcggccagtcccaataccagcccttcaggcaacttgcccttgcgttccaagtaagtcttcaaacccggcaaatcgcgtgtctggtattttgggaaggaattcagcatgatagaagtcacctgatggtctacaaacggattgttgaagcgttccagcacgtcatgtgcaaatttttccaattctgctttcggcaggttcagggtttccatcagttcctcgaacattactttatggataaacttgcctactaccggatgctggcaggcatcacgcacgatattgatacccgacaagtaagctaccggagaaagcacggtgtgtggtccgttcagcaaagtcactttccgttcgtggtacggtgcttccgacggcacaaagagcacattcagtccggctttgtcggccgggaattcggcagctacttcctgaggtgcttcaattacccacagatggaaaatttcggcctgcaccaccatgttgtcatcgtattgcagtttttctttgatagccgcaatatccttgcgcgggaatcccggtacgatacggtcaaccaatgtagcatacacaccacaagccttttcaaaccattgcttgaagtcatctcccaagttccaaagctcaatatactgatagatggtttctttcaacttgtgtccgttcaggaaaatcagttcacaggggaagataatcaatccctttgacatatctccctggaaggttttatagcgatgatacaaaagttgtgtcagcttgcccggataagaagaagccggtgcattttccagtttgcaggaagggtcgaacgcaatacctgcttcggttgtattggagattacgaaacgcatttccggctgttcggccagcttcatgaactcttcaaactgactgtaaggattcagtgcacggctgattacgtcaatcatggtcaggctgttcaccgtttcccctttgtccaagccctgcaaattgacatgataaagacaatcctgcgcgttcagcatgtcaatcattcctttttcgatgggctgaaccaccactacactgctgttgaaatcagccttttcgttcatgttgtagataatccagtcaacaaacgcacgaaggaaattaccttcgccaaactgaataattctttccggacggaccgttttctttgcggtctctttgtttaatgctttcatattatatctttaataacaaaattgttgtcctttcggccttttggttgcattttacccttcaaaaattagaagagttgaatgtaacccgttgtttttcacatacttgtctatccatctatggatttaattttcataaatgagtgttgcaaaggtaataaatattttgttattccaaataaaatttctactttcgtgttcgataacggataggtattcgatattttatgttgcccaacataaataaattgtaagttatctattcaatactatattatttgaaaacaactacgaaacttaaaaatacaatttatcatgaagaaatttatggacgaaaacttcctgctgcaaactgaaaccgcacaggagttatatcacaatcatgcggctaaaatgccgattattgactatcactgccacctgattccaaaaatggtagccgacgattaccagttcaaatccattactgaaatctggctgggaggtgaccactataaatggcgtgccatgcgaagcaacggagtggcagaacgttactgcaccggaacagacactaccgactgggaaaagttcgaaaaatgggctgaaactgttccttatacattccgcaacccgctgtatcactggacacacctggaactgaagactgctttcggcatcgacaagattctgaatccgtctaccgcccgcgaaatttttgacgaatgtaatgccaaactggctactccggaatattcagctcgcaacctgatgcgtcgctatcatgtagaaacagtctgcacaacggacgacccggtagattcactggaatatcacatcgctacccgtgaaagcggatttgaaatcaagatgctgcctacctggcgtccggataaggcaatggcagtagaagtgccggctgaattccgtgcctacgtagaaaaactggcagaagtaagcggtgtcagcatctctaactttgacgacatgattgaagcgctgcgcaaacgtcacgctttctttgccgaacaaggctgtaagttgtccgaccacggtattgaagagttctatgcagaagattatacggatgcggaaatccgcgccatcttcaacaaggtatacggtggtacggaactgacacacgaagaaattctgaagttcaagtcggccatgctggtggtattcggcgaaatggactgggaaactggctggacacagcagttccactacggtgctatccgcaacaacaataccaagatgttcaagctgttaggacctgacactggtttcgactctatcggtgaatttaccacagccaaatctatggcaaaatacctggatcgcctgaactcagaaggaaagcttactaagaccattctctacaacctgaatccttgcgccaacgaagtaatcgctaccatgttgggcaacttccaggatggttctatcccgggaaaaatccagttcggttcaggctggtggttcctcgatcagaaagacggtatggaaaaacagatgaacgcactttccctgctgggattgctgagccgcttcgtaggtatgcttaccgactcacgttccttcctttcttacccgcgtcatgaatacttccgccgtacactctgtaacctgctgggaagagatgtagaaaacggtgaaattcctgaatgcgaaatgccgcgcgtacaacagatggtggaagacatctgctacaacaacgccaagaattttttccagttctaagaaattacggtatatctaaaaacagatacaactcgtttgcaaggctgttccttttcggaatggccttgttttatttatatcttttttcgtttgcctttcctctcacctttcactatcttttcataagacaggaagcggttcgggatagccaaacctgaaaaactttgtttttcgtttgtctctcctctcacctttcactatctttgcgttcctttagcaaaaaagagagacaatgacagtaaaatttatgagtctggccagcggcagcagcggaaactgttactacctggctactgacaacaccgccatattggttgatgccggtatcggtatccgcaccatcaagaaggtatttaaggaacgtatgctaaaccttgaagggatacaggctgtactggttactcatgaccacgccgaccacatcaaggcagtagggcatttgggagagaagcacgggattccggtatataccactccggaaatacacgaaggcatgaagcacagctactgcatgaccgaacgattaagtcccgaacgtacccgctttatccggaaagaagaaacattcagcgtaggagatttcaccatcacctgcttcgaagtgcctcacgacggaaccgacaacgtgggttactgcatcacggcaggcgataagacattctctttcctgaccgacatcgggcatatcaccccgactgcctcacgcttcatacagcaggctgattacctgatactggaagccaactacgacgacagcatgctccagatgggaccttacccacagcatctgaaggagcgcattgccggcccgaacggacacatgagcaaccacgaaatggccgactacctgagtcatcattttccccagcgtttgaaacatttatggctctgccacctgagcaaggacaacaaccatccggagctggctttcaagacagtggaactggcattccggcaggaaaacatcatcgtaggaaaagacgtggaagtaactccactgaagcgaaccactccttctgaaatgtatatcctggaataacagaagaaaagaataaaagccatcggggcgtttcctctaaagtaaagaaacgccccgatggctttcttattacaaactgcgaatcagcgcaatctttcgtacgcctttaccagcatctcatccttgccgatagcacggatagccagccagttcaggataatgcttaccaatggaagacaaactgtccatgaaggcatgaaactgtagtcatcgaatgccttgtccggatttacgacaaaataagccagtaccaaatagtaaccaaccagcacaatcgtattgaagatggtcagacgaatctgcaacatacgtttccggtaaaggaaaatagtcaccaaagccatcacagccactactaccagtatcgcaaacaaagcccacggcgtatagttcaccgctccgtccggaagcaggtatgaaaggtttgtcatctcacaaatatttttatcggtatagaagctgcccacgggaacagacatcattactaccatcaagatagctactacgagcaaataaacggtctgtattctctgtatcataatcaatcgtattaaggtttccaaaacaaatgtcattctgagggcgacggttcttgccgtctacactcagaatgacaagcccaaatgcgcatgcgcattcactaaaatctttacctataggaggattactgcaatttttccttttcctttgccgggtttctgtaataaacctttccttctatgtactcctgagtcgcaatcaacgtcggtttcgggagtttttcataataacgagagatttcaatctgttctctgttttcaaacacctcttcaaggttatcgttataagaagcaaactcctgcagtttcttggaaaggtcattcttcatttcggcagcaatctggttggcacgcttgccgatgatagatactgtttcataaatattgcctgtgtcctcacagagttccatcaaattacgtgtaaccgtatttgtaggagcgtttgtttttttgtaatccataacttaatttataattataaacgtttatattattcttcatctgtagaaatgtacttgctgacttctttgaagatgtcttccacttctttcatgtatttgctttccgggaactcattcttgaaagcataatattcatccacggtttcgcgcatacggtcttctctcttttccagcacactctcctttgccatgtgatacttggcacggagaatcagaatagaaagttcctcacgcaatttggtgtaaggatattctttcaacacattctgtgctgtgacaatggctgccagataattgttacccgtgctgctatacaccgaatttcctgaataagagcccaagtcgtaatagagtttggaagaaaggtattccttctccaccaacttgtcctgcaactcaaaaatcatgttctgggcaatatcctttcgctgacttgcgggaaaatactccaaaaacatctgcagttcctgaatagccttgtacgtgctgctctggtccagacgtggttccggagtatcaaggaacaaagcctttccgctatgaaaacgcgccagttccgtataagtaccgcgcggataagtcgtataatacgtattaaaataatgtgaagcagtcacaaaatcaccctggttgtaataagtcattgccagcatatacaaagactcttccccgttggccgtacccttcagaataggaatcaattcttccagaatggttgccgcacgtgaattctgtcccttggcaaaatagcttttcgccgcttcgtatttgtattcatagtcagtgcttttcagcactttattgtactctccgcatgaagataaaactccagcagaaaggaggaccattgcgatatattttttcatatataattgatatagttgcgcaaaattactcttttccagcgaataatgcaactccaggccattttttaatgtaatttttcaggattgcaaagtatggtataaaatatatatgtaattttacaaccgttttcattcaccaatattcagatgcaatggattttgaactgatatccgactatcagcctaccggcgaccagccggaggccatcgcccaactgactgaaggtatccggcagcatgtgcctgcacagacgctgctgggagtaaccggctctggaaagacttttaccattgccaatgtcatcaagaacatcaacaagccgacactgattctgagtcacaacaagacactggccgcccagctttacggggagttcaaaaatttcttccctcacaatgcggtggagtattatgtgtcttactacgactattatcagccggaagcatacattccgtcgaccgatacttatattgaaaaagacctggccatcaacgaagaaatcgacaagcttcgtctggctgcaacttcttccctcctttccggccggaaggatgtcatcgtggtatcgtccgtatcgtgtatctacggtatgggaaacccggcagatttctacaacaacgtgattgaaatcaaaaaaggaaagctgctggaccgcaacgtattcctccgccggctggtggacagtctgtacgttcggaatgacatcgagctgaaccgaggcaacttccgtgtaaaaggtgatacggtggacatcttcctggcttataccgacagtgtgctgcgggtaatgttctgggacgatgagattgacggtattgaagagatagacccggtttcaggacaccgtatcggtacgttcgaagaatataagatttatccggccaacctgttcatgacaaccaaggaaagtacgctccgcgccattcatcagattgaagacgatctgaccaagcaggtggcttattttgaagaaatcggtaaaccttacgaagccaaacgtctgtacgagcgtgtgacctacgacatggaaatgctgcgcgagctgggacattgttcggggattgaaaactattcacgttacttcgacggacgcgaaccgggcacccgtccctactgtctgcttgatttcttccctgaagattttctgattgtcatcgatgaaagtcacgtcagcgtaccgcaaatcagggccatgtacggcggtgaccgtgcccgcaagacaaatctggtggaatacggattccgtctgccggccgccatggacaaccgtccgcttacattcgaagagttccagcagatggccaagcaggtgatttacgtgagtgccactccggcagaatacgaactgcaacagagtgaaggtatcgtagtggaacaggtgattcgtcctacgggactgttggacccggtgattgacgtacgtcccagcctgaaccagatagacgacctgatggaagagattcagcagcgcatcgaaagggaggagcgtgtgcttgtcactaccctgaccaagcgcatggcagaagaactgacggaatacctgctcaacaacggtatccgctgcgcttatatccacagcgacgtggaaacactggagcgtatcaaaatcatggacgaactgcgggaaggtatctacgatgtgctggtgggtgtcaacctgctgcgtgagggactcgacttgccggaggtgtcgctcgtagctatcctggatgccgacaaggaaggtttcctgcgttcgcaccgctcgctcacccagacggccggacgtgctgcccgcaacgtgaacggaaaggtcatcatgtatgccgaccgtattacggacagcatgcgacagaccatcgatgagaccaaccgccgacgggaaaagcagttggcttacaacgaagcacacggcatcacgccgaaacaaattacccgttcacgcgccaatgccctgctcgacatcgaaaaacagtcgtctcaggaaaacagcagcaaacccaaagaaccacgggcttataccgaaactgaagcccagcttcatgcagccgccgaccctgtggtacagtatatgacaaagggccagttgcagaagagcatcgaacagacccgcaagctgatgcaggaagcagccaagaaactggactttatcgaagcagcacaataccgcgacgagttgcttaaacttgaggaacttctgaaagaaaagtcctgatattggccagggctttctgcgacaaacgctctacgctttgaacggattttccggatatataaggcgtgtacaacacattcggaatatccttcagagcatcgcgagccacacccatgccagtcgcatcacacaggtaatagctgtgcttgcatgttctcagccatttcttcagggcatctacctcaaaagtaggtcctacagacgtatttaccagtatcttacggtcgcccatcaaggcaaactccggctcacccagcaggtaattgttgcgcggcaggcaggtacagatgatttccgcttccgtcagcaaatcggccagcgggcggtaggaaatgccctttgcttcggcttccggtttacgggtacggctgtagtacagcacctcggcaccgaaaaaccgcatggcttcggcaaccattcctccggtcttccccagaccgatgattcccaccttacgtcctgtcagttccgtactttcttccagccagcgtacattaccaaagccatgaagcagacgcaccagttcactgactacgtattccaccacaccttcatcgccataatctttcactcctaacaccgtaattccccttttgcgagcctctatcacatctacattcgaactttccgggttatagagcgtacagcacatacctatataacggatgttcgggcaagcatccagcacagaccgacggataggcgtacggaaagataccagcagacaatcggcattgccaatacggcgaattacttcctcttcttcagtgggaaaatcatgatatacaaccacttcttcccctattgttttcaattgttcgagcgccgcttcattcagcaacgtctcgtctacggctactattttcttgaaattcatatcttctttatgtaaattattcattcgaaagtacataaaacccgataatgccgcaaggaaaatccgcagagttttgtaggaaaggaaatacgcacaacaaaacaactgaattcccatgtacaaaagcactttcaaaatgagagataatttgatataaaaattatattatgacatcattttttcaaataatatatcctttttaatttattatttatacttttgcgacaaaatcaaaacaaacagaaaatggaacagcttacaaaaattgtgcaagaaatcagttcgtttatgtggggatggcccatgattatcatgctcctgggcacccatctttatctcaccatccggttgcgttttccgcagttacatatcctcaaggccttacgactctctgtaagcaaggataaagatgcaggaggcgatgtcagccagttcggagcactggccacttcactggcagctaccatcgggaccggaaacattatcggagtagcgaccgccgtcgcattgggcggaccgggtgccgtgttctggtgctggctgacaggtgtactgggcatgtcgaccaaatacgctgaaggacttctggccgtaaaataccgcataaagaattcgtcgggcgagatgattggcggaccgatgtatgcgctggaacgcggcttaggattgaaatggctcggagttctgttctgtatctttaccgcactggctgctttcggcatcggcaacacggtacaggccaactcaatttccctgctgctgaatgaatcgtacggagtatctcctcacctgacaggtatcctgatgagtattctcacggctttggtagtcatcggcggagtaaagagcatcgccagagtctgtatgggcctcgtacccattatggccttactctatgtagggggatgtatttatattctgatcgtcaaccatgcctatttaggagaatctttccggctgatttttgaatctgccttttcggcacgggcggcaggcagcggattcataggaaccacggtcatgatggctgcccgctacggtattgcccgcggactattctccaacgaatcaggactgggttccgcaccgattgtagccgccgcagcacagacacgcaaccccgtacgtcaggcactggtctcctctaccggaactttctgggatacggtcgtgatatgtgcgctgacaggtctcgtactggtaagcagtatcctggcctatccggacattgattataccagcgacgcggcactcaccaagatggcttttgccaaaatcccctatatcggtactcccatcctttcgtttggtatcgtcacttttgccttcagcaccattttaggatggacctattactcacagaaagcagtagaatacctgggtggaaagaaaatcatgtttgcctatcgtctgatgtggattctgatgatttacgagggttccgtcatcaacctcgctcttgtgtggaactttgccgacttggttaatgccctcatggctattcctaatctcatttcattggttctgctgtcgggagtggttgtcagcgaaacgcgtaaatatttatgggacaatcgcttgaacgactatcacgaagaataagttctatctccggaaaacatgcctgcgtctgctataaaacgcaagtacgtttccatccaaacgcaagtacgtttaaagtaaaacacaagtgcgtttcaatgcaaatgcctaagcgttctaattaaaacgtccttgcgttttttatttcattctctcattcatgatgaatcacacacaatccacatttacgggctatatcctcatcactctctcaggacaactgattgatatgcaaaaagccccggaaaaccttatgcaagtctccggggctcttcttatttatcaatctctcttattttgcttcgttcaagtcgatgcctttgttgcgcagtgtcatggccatcagacgaacatagttagaatactgtttttcgtccaacgtctgcttcatcaatttcaagttaccgtaaacagccttacgaactttttctttgttttctgtctttgaagaatttgcacgagtcatttcctgttcaaagtagtcgcagatgtcagcaactttttcatgctggttagatgaaagattcaaatatttagtcagctttgacttgttgattgaaccattccatttctgtgcattgttgtcctgtacaccttctgcaaacatagaaactgaaaataccaatgcggctgctaatgttaatcctaatcttttcatacctttaaaatcttttacctaaaaactttgttacctaaataatttaaaatctagcttagctcgagctttttttccttttaccgccacaaagataaggatatgttggacaacataaaaataaactacaaagaaagttgctctacccctatcatttattgacgtatatcaagaaaagtatagcaaaatgaacaatttcttcacatttttgtaatataaagcttcatttcactttctattgattaccctttgaaccgtatccgcataaaaaaaaggctttcaggatatttcctgaaagccttttgcttcattatgtcataaattctgcggattatccaccgaagttatcatacatgatagaagattcttctacgccgaggctatccagcatagcgacaactgccttcgacatcggaccaggaccacacatgtagtattcgatgtcttccggagcttcgtggtctttcaagtaagtgttcaacattacctgatgaacgaatcctgctgtatacttcacgccagctgcatcggctgcagggtccggacggtccagagccagatggaagtggaagttcgggaagtctttttccagtttcaagaagtcgtccagatagaacacttcgttcaacgcacgcgcaccatagaagtaatgcaattcacggtcagtagtatgcaatgtacgagtcatgtgcataatctgtgcacgaagcggagccataccggcaccaccacctacccagatcatttccttcttagaatcgaaaatcggatggaagtctccgtaaggaccactcatcaataccttgtcacccggtttcagggtaaagatataagaagaagcgatacccggatttacatccatgaatccgctgcggtctggcttgaacggaggagttgcgatacgaactgtcaacatgaacacgtcaccttctgcagggtagttagccatagagtaagcacggatagtttcttcttcgttcttacatttcagaccgaacaaaccgaatttttcccatgcaggcaagtattcagcaccgataagatctttgtcgatatccttgttgtaatccatttcgaatttaggaatcttaatctgtgcgtatgaacccggaataaagtccatgtgcgcacccttgggcaactgcaccttgaactccttgataaaggtagccacgttcttgttggagataaccgtacattcgtattcctttacacccattacagattcaggaaccttgatagccatatctcccttcactttcacctgacagcccagacgccagtggtctttctgctgtttacggctgaagtggctcacctcagaaggcaggatttcgcctccaccttctactacctgacatttacactgtccgcaagaccccttaccaccacaagctgaaggcaagaacactccgtttacggccaatgtgttcagcaatgtagagccagactctacttccatatccttatcgccgttgatagtcagtttcacattaccggaagcaacgaggaaattctttgcaaccagcaggatgactaccagcaccagaatagtcacgaggaatactccaatgcttgctaaaataaaattcatatccattgtcttattcctttcctattagatgttcaaaccagagaaacacataaatgccattgccatcagacctacagtgatgaatgtgatgcccaagcctttcagcggagcaggtacgtcagagtaagccattttttcacggatagcagccagacctacgatagccagcaaccagccgatacctgaacccagtgcgtaagagatagaatcccagatatcgccgatgtatttagcatcagacgggctcagagtgatacgctgctgcatgaacagagaagcacccatgatggcacagtttacagcaatcaacggcaggaagatacccagtgacgcatacagtgaaggactgaagcgttctacaatcatttctaccagctgaacgatagccgcaattacggcaatgaaaagaatgaagctcaggaagctcaagtcaattcccagaatgccgtcggcagccagtaccttcgtctgcagaaggtagttcaccggcaaggtaaccaccagcacgaaagttacggcgatacccagaccgagggcagtcttcacgttcttcgataccgccaggtatgaacacatacccaggaagaacgcaaatatcatattgtccacaaagattgagcggaccaataaactaaaaaaatgttccataattctggatttttaatttccgttgttggttaataattattctttttcttgcaactctttgtgttttgcacgctgataccagatcaggcaagctacgatgatcaaagccatcggcggcatcaacatcaaaccgttgtttacataaccggcattctttacagcctcatagttcagaatgttgaagcccaacagtgttcctgaacccagcaattcacggaagaatgcaacgattaccagaatcttggcataacccagaccgttaccaataccgtcaaggcatgattcccacggaccgtttgacatagcaaatgcttccagacgtcccatcaggatacagttggtaatgatcaaacctacgtatacagacaactgtacgctcacgtcgtaagcaaaagctttcagcaactcacttacgatagttaccaaagcagctacaactaccagctgtacgatgatacgaatacggttaggcactgtcttacgcaacaaagaaatcactacgttagaaaaagcagtaataatggttacagaaagacccatcacgatggccggctccagtttggaggttacagccaatgcagaacagatacccaacacctgtacggttaccgggttgttcatgcctataggagtagaaaatacttctctgtttttagctgaaaataaacttcccattttcgttctcctccttattctttagatgttaaaaatttagcgtaatgtgtcatacatcctttcaacatggcatctacaccaactgaagtgattgtaccaccagagataccgtctacctggaattccggattttcaacttttccgttctttacaactcccagtgcaacggcctcaccgtccattacatgcttgtccttaaattcactctggaaatgatctcctgcaatttctgctcccagacccggagtttcagacgcatgagagaagtaagttccgtatactgtattcttgtcttcgttcaaggcaacatatccccagatagcaccccaaagaccagcaccgtataccggaattacatatttagtttgtccttcgatttcacatacgaagatatgagcacgaccgttttccttgaaatctttttcgtaagaagtcacgaaagcgccttcatacggagtcagtgtgccgtcttcagctaccaccatatccgatttcaccactttagcaaattcagcttctgcatcctgcacacctttgatgcccagtgaagaaagaatctgcttctttgtatccagctctacgttctttccctgcaagtcgcgcaaagaagagttcacgaaagccagcaagaatgctacgataacaaccattaccgaagcataaatgatagtataagagttactattagtattcattgtattttcggtttttatttgttagacatagcacgttttgcacggcgagaaatgttattctgaactactacgtagtcaatcagcggagcgaagatgttcatcagcaggatagccaacatcataccttcaggataacccggattcaatacacggataataattgccatggcaccaatcaggaagccatatacaaacttaccgttttcagtacgtgaagaagttacagggtctgtagccataaacacagcaccgaagcagaaaccacccaagcacaagtgttcataccaaggcatcttagccattgcagtgtccggaccgatggtattgaaaatccatcccattaccgcaccacctacaaatactgacaacattgtcttccagcttgccacacctgaccacaacaggataaccgcaccgatagcaatagcaattacgctggtttcaccgatagaacccggaatcagaccagttaccatatcccaagagaaagcaggatatgccatcgcatcagttgcagtagaagcctgtccaagtgctgtagcagcagtcagaccgtctacattgcttcccaagccaaagatgctgtcgctggatacccatacagtatcaccagacattttggtcggataagcaaagaacaagaatgcacgagtaatcaatgcagggttaaagatattcatacctgtaccaccgaacacttcctttgcaaacaccacagagaaagcagtagccacggccagcatccacaacggacactcaaccggcacaatcatcggaatcaacataccggaaaccaggaaaccttcctgaatttcttccttcttccactgggctaccacaaattcgatacccagacctaccacgtaggatacaatgattttcggcagtacagccaggaaaccatagccgaacatttcccagaagcttccttctacattggtagcatggaaatgctggtaacctacattatacataccgaacaacaaggccggtatcagcgcaatcaccacgaacgacatgatacgtttgctgtctatcgcatcgtggatgtgcgtacctgtcttcgaagtagtgttcggaacaaacaggaatgtttcaaacccgtcgaacacagaacgaaaagcatgaaatttgcctccctcttcaaagttaggctttatcttatcgagataatttcttaacgcgttcatttattaataatcgttttagttagcattaacacatttcacggcggagcatgtcgagtccgtcgcgaacaatacgctgcagttccatctttgaagagcagacaaattcacacaaggcaaagtcttccggagctacctcataaatacccaatgcctccatccggtcaatatctcctgcaatgatggctttaatcaggtattccggcagaatgtccatcggaagtacatggtcgtattcatttgacatgatcatgtggcgttccccacccttcacacgggcatccaacacatactctttctttttacacatcatccagctgaaataagaacggctggtactgaagtcattgaaacgcggcataatccaacccagcatttcgtgcacgtcatttccttccggaatcacagtcacctggctgtgaaaagctcccagataaccgttcgcagaaatctgcttaccagtgagcacgttaccgctgatgtaacgcaaagccttgtcttttgtcacgttgttttcaaacacacctgtcagcagtgcacctactttcagtttcacgtaggcaggcttgagcacttccgaaccagtcactgctaccgtgcgggtaaagtctacatgacccgtattgaacagacggccgatgaagataacagcctgcggatcgatagtccatactgtttcacccttgtttacaggagcgatgtggttaatctgtacaccaacgttacctgcaggatgcggtccgtcaaatacagttacttccacgttcttcgcctgcgtcaaagccggtgatttctgatttacactgatactcaggtatgtcttggccatcttagccaatgcatccaatccagtctggaagtttgcttcttcgcctgaaagcgccagttcgaattctggagccagcgggtttgtgtcgaatgcagaaacgaagatagcacgaggtgccacagtcggatcggccactacgtcatacggacgctgacggataaacgcgaacaaaccggcattcagcagcatttcctttacagcagccccgtcaagcgcagccacgctcttcttgccgaattcttcaaagtcctgttccgtagcagcctgcacggtgatgctcatcaccttgcgtcttgccccacgttccacgcttgtcactacgccgcttaccggcgaaacaaatttcacttctggatgattcttgtctacaaacaagggtcctccggccatcacatattcctgttccttcacgaccactttcggagtcacgcctgtaaaatcatcgggacacagagtatagaatcccggctctttcacagccaccacttccgcagccgccttacctttcaggtttatgtccaagcctttacgcaacttaattaaatttgccatgttaggttataaaaaatggttttgtattttgcgtgcaaaattaaataaaaaagaggtgaaaaaagaatatttgcccatcgaattagagaaatatttctttatatcgaaaggcaaatagtaaatcactatgacaaaatggctattctgccatatagagagagcaaaaatacacttaatatcccttgtgctggtgcagctgagggttcatgtcaattactttttccggaatcgggaagacggtagtatagccgttttcctcccccggaagctgcggacgacaactatacgaacgggtaaaaacaccgaaacgaatcatatcctgccgtctccagccttcccaggccagctccatcattcgctcatccagcaaattttccaatgtagcagttctcggagccatacctacccgacttctcactaaattcagctcggcatcgccatcttccccattccgcaccttagcctcactttgcatgagcagcacgtcggcgtagcggaacaacacgatgtcattgtccagcaattttccgtccttaagccccgtcttatcgacttcgtattttttcattcgggctccggctgttttctcgtacggcttccccgacacatccagcgccacgttccaaggctcatacaccagtggagtaaccccgtcatccagcagaatctgatttccctccaaatcctttaccggcccggcaaaatagcagtaatcaaaacgggcatccacctgcggcgtatcatacccgaaggtctccagtacctctttcgtggccgacgagccattttcaccactcaacccatacgccttggcatggttgtaatgccgcgaacggaacaagtagataaactggttggtgtataaagtcttgctcatgggaatgacaaaaatattttcctccgaggactcattgaacacggcaaagttggctgtataatccttttccagggtatatcctgctgctgtaatcttttcacaataatagttcaccgtttgccaggcattcagacgttgtccctccacttcgaaaaagatggatttcccgtccggacggcttccgtctgtccagtcatcatcggtataaacttccgcattcaaggctaacttagcgagcaaaaaccacaccactggctgtgtcattctcccgtaatacactcccggctgattgctccgctctttactcaaaagagaagaagattccgtaagttctttcacaatgaaattaaatactttagaacgcttttcctgaacaatatcttcaactgccggatcactcttttcaatcagtggaacgctcccgaacaaatccatgatataataataaaacatggctctcaatgcccgtacttcagccacacaatctgctacattttccttgggatgtttttctgcaaaatcctgtattctttccaaagagccattacacaaaatcaccgtacgatacaggtattcccaagtggcataaatcgcctcattgttcactccccagcgatgcaagtacaatccctgccagaacccaccgtcataccagtctcctccacgtgtgggcatgatagcctcatcagtagtaaacgtattcaaatcatagatacctcggccagtcccctgaaggccctgactgtcgacatatccacccacgtaattatacaacgaaagcaccccatttttctgcacgtccgacaaggtagaataagccgtttcttcatccagacggtccttcggattttcttccagataactactgcaagaagtccataacagaagaaaaaacgatgcaaatagtattgagtatattcttttcataataagcagattaaaagttaagacctaaactaatcatataagttcttgaaagaggataagtacgcttgtcgtccaccccaaaagtatcgtccaccaaggtagaattaatcagtggagtcagccccgaatagccggatattgtgcccaggttgttaatggtcagtgccaggcgtgccccgtgcaagaaacgctgttttttgataggtacgttccaacccacagtcaggtaatcaaagttcacataattgccactttccaaccagtaatccgttgccgtcaggtcatgtatattccgtgccggagcctcagccaacacattgtaatccggcaagctgttcatgttcatgtaactcagcgccgtgccattataaatcttatgcccgaatgctccgtttatctgtaacgacacatcaaaacgcttgtaacggaagctgatattggaacctaacaaagtcttgggagtagcctgtccggctacataacggtcttctccttcctccaagttcacgcctcctccattcaagtcagcaatctgataagtatatcctccgttcccatccgaaaccagtccttcacaatgtggcagatagaaaacgcccaacggctgtcctacaatctgatacacgatattattgtatccgccatgcagtcccgcaccgttcagtccggccaaagccgtatattgcgccgcactgatgtattctccttcatacataccgctcagcgacagcaatttgttccgctggaaagttacgtttgcgttgatattcagctccatgtccttggtccgcaagggtgtgataccgatggagagttccgttccactgttccgcatggagcccagattagccaaaagtttgttataggcaaacggaggaacactgacatcatacatatacagcatatcccttgtcttcgacagataataattcaccgacagcaacaagcggtttccgtagaatcccatgtccacccccgcattgaaggtcgacttgacttcccatttcaaatccggattgacgtttttcaggctctcatacgtcaccaaaggcgagtttcccaccggagttaccccgttaggacgcaccagcgccatggtagtatacgaatcaatccctccttgatttcctgccaatccatatcccaatcgcagtttcagattatcaaccaggtgaaaacgtctcataaacttctcacgggttatattccacgctgcagaaacagaagggaatacgccccatttatgattccgtccaaatttggaagatgcatccgtacgcaagttcaccgtcagcacgtaacggtcatcgtacgtataattcacacgtcccagaaacgacaccagatgcggctcttcataataggaaccggtaccttcccaaggacgcaatgctccaccctgcaagctatgataccccaactcattggaagaaaaattagtcgtagtcgtgtaaaaaccgtgaaaacgattcttctctacctcccctaaagccagcacatccagaaagtgagcccccaactgcttctgatacgtcagcatcaggtttcctaataaggcttccgacttccggtttccccggtaagcctgtccgttggcccataccgttgttggcagaaactgggcgttttctgttgtgctataggtataagaacccaatagcaccatcttcaaatccttcagcaaattaaaagtcaggcgggcgtgcgaactgaaataagaagtctcctcgcgattatccacgtccatccaggccaatggatttgtaatctgactagccgtcgtaatctggtcccagctcccggtttccggatccgggaaatcaggaaaagtaggattaaaagccgctgccgaataaaaagtcttctgtaagtcaaacagcgtacgatcgcgcttcatcgaaccgaataaccccaattcacagtcaatcagtccgtcaagcatcttctgcgacatattcatattggccgtaaacagtttcatgccctcattctgaatcactccctcacgattctgaaagcctaacgacaccctgtaattggaagcctcaccacccccataaaacgcaatgttatgattctgctgcaagcccgtctgttcaatggctttctggaaatccgtgtcatatcccttatccagaatactccatcctcgttcagccgccagcttgcgatacgctgctcccgaaagcatatccaaccgacgataagcatgcgacacaccaaaactaccattgtaattcacgcgtgtcttccctgcccggcctttcttggtgacaatattaatgactcccgatgctccacgtgaaccatactgcgccgtttccgacgcatccttcaaaatcgtaaaagactctatatcggtgggatataccgaggtcagcatcgtcaaatcacccaatactccgtccacgataatcagcgggtcatttccactggtcagcgaagtcgtaccacgcaggcggaccgactccagcgccgccattccattgttactcttcaagatggtaagtcccggcacgcgtccctgaatggcttccagcggattggttatcagctcacggttcatctgcttttccgtaatctgttccaccgaaccggaaatattcttcaaactaccacgggcataaccgatgttataaattgaatcgggaggcaattcgtctacattctgtccttgtacataaagcgggaatccggctcccatataccctaagaacaacaagctgtacaaagcctgagatattggctgcattttatccatagcacacttatttaaggtcaaaagggcgtgaagataccaaaacctccacgccccgtataatcagttccttcttttcacaaagaaaagatatttctaccgataaagcaagccctgagccatgttatttctgcccggtcatcatttttcttccgcaaacatcggatcccatgccggaagctgtatcggcttctgcttgaagatgtccagcaccttcttcggtacatatttcgtttccagcaccaggcggaacatatactcattgaaccattcatccgtcataatcaggtgtccctgatagcccgatgcagctccccagctgttttccaccatccatttcttcggttttccattcgcgtccaaatctaccgccatcagcgtcatggcatgtgccgacatgctggcaaacgtctggatacgttctttcttatccattccgaaagtcgtacccatcaacgaaccgaaatcataattgtttacatccagcagcccacgcttgctgtccagctgtgtcacatcgcttgagaaatacatccgtgtgctgtctttcaatgacgcaatggccatttccttgatttcctctaccggcagattcacatacgtccagttctttccatcgtaacggtgacggtcgtatgcaatttcgtaacacttgtaatattcacgtgaaggatcgttcatcaccatcacatagttagtcagcaggttcgtatcaccgtatttttccaggaacgacatcggtgtgtgatgctctgtagccaccacattccctttgctgtccttacgtacatagtcgaactcagtcggtggcactcccaaagtcagcaccagcatacgatacaccgtgctcagcatctcttccttacggctttcaatcgttgcagccttctctcctttagcagccatttctctcagttccagaccgaattccttcagcttcaggccaatcaaagaagacatgtacgaggtgtgttcactgctgtatgtttccggcatagcctctttaggcacgagaccgtatttcgacacgatgtcggctactcccgtaaaggtacctccgtcgctcagcggatgcttgaacagccattccacagtctgatcgttcatcggtttaccagccgtttcaataactccctgcaagaacagattggatttttccagctggtcccaaaagaaagaatatacctgcgagaactccagtcccggcaagtcatagcgtgcaatggccttggcacgcatcacgttcaggcccgtaaacagccagcaacggccagacgactgctggtcggtgatgccttttgattccaccttaatggagaaatccgtattcagcgccttctggttttcctggttcagtgccagttccttgatgctggtacctcccatggcattccgcaatgccttgtcggcagccgtattctgataactactctgaatttttttcaacatatctggagagatgcctccatcctgagcctgtaccgtcagtccgaaagccaacagacaagcagccaatgttacgtgtttctggttcattctattatggttttaatgaaaattgtttcttaatccttttttaccgaacgtacaatcttaaagccgatgcacgccacgaagatactcatcagcggactcagcaagttaaagaaactatacggtaaatacaccagtgtaggcacattcagtatcgtggcctgcgtcattccgcatgtgttccagggaatcagcggactggtcaccgtaacggcatcttccgttgttcggcttaacaagcgcgattcgtatccgttcttcttataaatatccttgaacatgtttccggtcagaataatcgaaatatactggtcggcagtagccagattcaggaataaaccggaagctacagttgctgccaccgtacttgccagcttatgcgtaaagcgtacaaacatacgcgtaatacttcccaacatgccgcaggccgtcatggctccgcccaggcacatggcacagagaatcagccataccgtatccatcatacctcccattccacgggtggcaatcagttcagtcaatgcaggagtagaagcctgcagtgatgtactgcccgacaaggccagtaacacacctttatataaagcttcccctccgctcactccgtcaccggccacttcacggagtacatctgtctggaaaaccagcatacacaccacagccaaagcggtcgatatgaataaggtaataatagaagacaccttacgggcaattaatattcctgtcaccaccggcaccagcaacacccagagagtaatatgaaaacgttccgccagtccggtagtaaacacggcaatctgcgaactgtctgatgcctcatgcgaaaatccggctattgtaaaaataaccagtgaaatgaccaccgaaggcaccgtggtgtacatcatgtaacggatatgcgtaaacagcggcgtatctgtcaccgaggaagccagaatggtcgtatccgaaagcggagaaaccttgtctccgaaatatgcacccgagataatcgctccggcaatccatccctcatcaaaaccctgtgccttgccgatacccatcaaagcaataccgatggtcgcaatggtggtccacgagctacccgtcatgaccgataccactgcacaaatcacacagcacgacacgaggaaaaatttcggatgaataatctgtaccccatagtaaatcagcataggtaccactccccctaacatccaggctgccgaaagtgctccgataatcaacaggataatcaaagccgaactcacccccgcaatgttgttgataatggcatgttcaatatccttccagctcaccccataccggctcatacccaaagccgcacacaaagccgtagtcagtagcaaacaaatctggcttccgccacctaacgcgtcagctcccaacagacgaatcgtaaagaaaagtaataccaccaataccgctacaggcagcaaagacaccagcggagaaggaatcttcattttttgcgtcatttttatccgtttaagtctaatttcattactaaattaataacggctgcaaatttccgaatatttttccaattttccatacaaaatccatatatatttacattttatgctacagaaatgaataaaaatagatttccaattcatttataccaaccgtgaaaggccatcgtccaaaacttaaaaactactaataacaccctcaaaggcccttttcttcgagggttatttgtacatttgtctataatttgcataaataaagaatgagtaaagccacgcgcataaaacaagccatacgtatcacggtcatttcgacactggtattctatttcggtctgattgctctgctgaaccttccggctgtccaacaccgcatcagtacgtatgctgcccgtgaacttacccgtcttacccaggccgaagtcagcattggcaacgtagacttagggcttctgaaccgcgtcgtcatccagaacgtgcagataaaagaccggcagaagaaagatatgctcggcatttcgcgcttttccgtcaagattgacattccttctctcctccgtggaaaaatccgtatcagcagtgtccagctattcggactggatgcccgcctgaaccgtgcccatcccaaggctcccctgaattgccagtttctgattgatacttttgcttcaaaagatacgacaaagagcgaaaagtccatcgacctgcgtatcaattccgtacttatccgccgcggacaaatccactacgatgtgctgtcggaatccaatacaccccgccggttcaatcctcatcacatcggtatcagcgaactttcggcaaccatctccttgaaggccttgcagaccgattcgctcaacgcacaaatccgccgtatgagtttcaatgagcaaagcggatttcaactgaagaaatttgcgctgaaggccacagctacccccaaaggtatccatttgcatgacctgaacctgagccttccggccacgacggtaaacatcgacacatttaccgtagcaggagaactcaccacacccgactttatttcagatacgcaaacctcctacatgggtcgcctgaatgcctcggtcactccggccgacatcgcctgctttgtccctgcactccagcattttcaggactccgtacatatcgacctggcctttcatggaagagggaaacaggctcgatgtaccaatttctatctctccagcccgcacaaagcactggaaatacatgcagaaggaatgctcgaccacagcaatccttcacaaccgccttatttttttggtcaaatcacacaggctgatgccgacgagaccgccatatcctggctcatacataatttgaaaggtaccgctgcacctgtacccgacatcctgcagcgtctgggctttcttaaatttcagggtgatgtatcgggatacccttcccgtatcactgcacacggtaccctgcaaagccaaccgggacagattaatgccaatctgaccatgcacaccgacaccctgacccagcaaaaaagttattccggaaaagtttccacccataattttgagcttggcaaactgctggcgaaaaaagaactgggtaaaacctcttttgacctggaactgaacgggctgcaataccgaaaccatcagccagaatcgcatatcaaaggagaaatctcttctttagagtacaatgactaccaataccagcacatcgcactgaacggaaatttcaagccgggcggtttcaacggccatctgtcactcgacgatgaaaatggtaaaatcagcgtagacgggaatttcgtgacccaacaggccgtacctgacttcaacctgcgggtaaaagtacgtgattttcgtccccataaacttcagctgacgaaaaaatacgaagataccgacgtatcattgaacctgacggcagacttttcaggacattccattgacgatgtccagggaaaaatcagcctcgacagtctttcagttcgcacgcccaacgaagaagaaaactatttccttccccgcctgcagattgatgcgacacagcttacctcacaagacaagcagaaggaaatacgcattgactccccattcctgaccggaaccatacaaggacaatatgcctaccacaccctgctgaagagcatggagaaagtgatccggaagcatcttccatccctgttccctgaggagaagccgaaaaaaggaagaaagaaacccgcagagctgaacaaccagttccggttccagttccgcatggaaaacagcgaatttctttcaaaggttttgaacattccgttcgagttgcagatgccggctacattctccgggcagcttaacgacagtctttcgcagatgcgcatcaacggctcgattcctcaattcacatataaagggaaatactacgaatcgggcaccctgttgtgtgaaagccgttccgatgaactgcagtgccagttacgcgccggcaccttgatgaaaaaaggagccatgttcaatttctccctcatcacgcgggccaaagacgacaaactgcacagcaccatttactggggcaacaacacccagctcacctatagcggcaagattgacgccatcgcttctttccgtcaggacagcctgaagagggtactccacacccgtgtagatatccagcccagccaggtcattctgaatgacaccacctggaacatccatccggctactgtagacatcgcaaaagacagcatcgaaatacacgacttcctgtttgagcaccgcgaccagcacttgaaaatcaacggacgactgggaaaaacagaagctgactcctgtctggtagacttgaagaacatcaacctgctctacatcatggacatgattcagtttcattccgtacgcttcgacggaggcatcagcgggaaagtccacctgcgccacgtgcttgaggacccggtgatggaagcccgtctcgatgtgaaagatttctccctcaatcatgccctgctaggacgcgccgacatcctcggctcatgggacaaagagttggggggcgttcgcctcaatgctgacatccgccgcgacagtgcctgcaccacacgggtcatcggctacgtatcgcccaagatgaagggcctcgacctccatatccaggccggaggaacccctctctccttcctgcaaccattcgtggaaaatatattcagcaatgtcaacggaagcgtacatggcgacgtgcgtctgttcggccccttctcccagcttgatttggaagggaaagtcaaggcacagatgcagatgaaggtcaacattctgaatgctactttcctggcctcggccgattccgtacacatcgcttccggcttgttccgtttccagaacgtgcgcttgcaggacactgaaggacataccggactggctaacggtgagttacggcataccaaattaaaaaacctgagctaccagttccgcttcaataccgaccgcatgctggtattccactctgaaaaggaaactccggaattccccttctacggtcatatctatgccaccggaaacgtatttctccggggaggcgacggacagctgaacgttgacggagaagtccgtgccgacaaccagaccgaatttgtctacgtattaggaacagcagccgaggctaccaactccggcttcatcaccttcgtagaccgtactccacgccgcaaacaagctgcggtcaaggccgaagtgtaccacccgctcaaccagcccgacaagcaggacgacgatgatacacctaccgccatccacatcaatctgcagatagaacctgccgaacgtgccaacatgaaaatcatcatggacccttcggccggagactatatttctgcctacggaaccggcaacctgcgcatcaacttctttaatcagggcaacttccagatgttcggtaactacaacattactgaaggaatctacaagatgagtatgcagaacgtcatccgaaaagacttcaccctgcagcccggaggtgtggtatccttcaacggcgaccctaaagccgccaacctgaacgtgcaggccgtctatacggtgaactccgcttcactgaacgacctgatagccgacgcttcctcttcacgtggaaacgtgcgggtaaactgtctgttgaacctgagcggtaacctcacgtctcccaacctgaccttcgggcttgaactgcccaccgtaagcgaggaagaccgcgaactggtacgcagtcttaccagcactgaagagcagatgaacacgcagattatctatctactgggagtcggcaagttctatacctatgactatgccaataacaccgggcagaccgatgcaaccagctcattggccttcagcaccctatcgggccagttgaacaacatgctttcgcaagtcatcgacaaccagaactggaacgtaggtaccaacctcaccaccggagaaaaaggctggagcgatgtagaagccgaagccatcctgtccggacgcttactgaacaaccgactgataatcaacggaaacttcggttaccgcgaaaacaccatgcgtaatacaaactttgtgggtgacttcgaagccatctggctgctcaccaagaacggagaattccgtctgcgcggatacaaccagaccaacgaccgctacttcacgaagtccacccttaccactcagggcattggtatcatgtacaagaaagacttcatgaactggaaagaactcgtcgactggttcctccgccgccggaaaaaccgcagcagcaaacagaaagaaaaagaagaccagaaataccttccgcaggaagcccttcctgccgccagagaaaaaagagaatcaaacgaaaaataattatacaagaatatggaaaagacctattacctacccgccgaatggcacaaacaaagttacatacagcttacctggcctcatgccgataccgactgggcctatatgctcgatgaagtagagacctgctttgtccgccttgctaccgaaatagccagccgccagcccctgttgctcgtggctcccgaatttccggcagccctggccgacttcccctatcgtgaccagattacttttgtgaaatgcccaacaaacgacacctgggcccgtgaccacgcttttatcaccctgctggaaaaacactccgacccacagttgctcgacttctgcttcaacggctgggggatgaagtttgctgctcataaggataacctcatcaacagtcatctgttcaagaccggtgtacttaacggcgactacatcaactgccgcaacttcgtgcttgaaggcggttccattgaaagcgacggagaaggtactttgctcaccacctccccctgcctgttggctcccaaccgcaatgacaccctctcgcgcaaagacatcgaagcctacctgatggaacgcttcaacctgcgtcaggtgctctggctggactacggctacctggccggtgacgacacagacagccacgtagacaccctggcccgtctctgtcccgaccacaccattacttacgtgcagtgcctggacaagaacgacgagcactacggtgccctccgctccatggaagaccagctcaagaccttccgtaccctcgacggagacccctaccgtctgcttccgctgcccatgcccgaagccatctatgacgaagacggcgaacgtcttccggccacctacgccaacttcctgattatgaacgaggctgtgctctaccctacctacgcccaaccggaaaacgatgcccgtgccgcacaggtactggctgaggccttccccggacgtgaaatcgtaggcgtggattgccgtgcgcttatcaagcagcatggttctctccactgcgtcaccatgcaatatcctgaatctgtaaaaaaccaaatagcacaatgaaacgaactatccgtgtcggtatcgtacaacaggcttgtacgaacgacctcaaactgaatcttgaaaagctgcaccgcaacatcgcctccgtggcacaggccggtgcgcagttagtagttcttcaggaactccataacactccttatttctgccagacagaggataccaatctgttcgacctggccgaacccattcccggtccttctaccggcttctacagtgagatagccgccgcctaccacatcgtgctggtcacttcgctgttcgaacgccgtgcggccggattgtatcacaacactgccgtggtattcgacactgacggaagcatcgccggaaagtaccgtaagatgcacattccagatgaccctgcttactacgagaagttctatttcactcccggcgacttaggattcgaacccattcagacctccatcggtaagctcggcgtgcaggtttgctgggaccagtggtatccggaaggagcccgcatcatggccctgaaaggtgctgaactgttgatttaccctactgccatcggctgggaaagcaccgacactcaggaagaaaagatgcgccagctgggggcatgggtaaccgtacagcgcggtcacgccgtagccaacggtctgcccgttatcgccgtaaaccgtgtaggtcttgaacccgacccttccggccagaccaacggtatccaattctggggtaacagcttcgtagccggtccgcaaggcgaaatcatcgcccaggccagcaacctgaaagaagaaaacatggtggtagaaatcgacatgaatcgcagtgaaaatgtccgccgctggtggcccttcctgcgcgaccgccgcatcgatgaatttgagcagctcacccgccggtttatcgactaacaggctgagttacaaataaagaaaaggattattacctgtgggtagtggtccttttttctgtattataaaaaatgttttatccttgcattgaatatgcaataacgttatctttgcaaaaaagataaataatatgggaaagtctacagatacaaaagcaaagaaacaaattacaaagcctgattctgtaaaggtaaactttaaaaaggttactaaaaaagaacacgccaaatacagaatacaggtctattcttacctcgttccctaatgaaaatcctacctccttattatggttccgtatttattatgcggaaagcgccaacttgtaaaggaataaaacatttgaacaccacaccgacgaacgcaatagcgcatacctaatgcttagaaaaacagaattagacaaaaataccttctctataaaagatatagaaaacttttttagagacatatacatgttatcataatctatctctttctcatcgtctatcccaaaaactcggagtcagcagcagtagtacaccgaagagttccagacgccctatcagcatcataaacgacaacagccacttcgccaggtcaggaagcgcactccatgaaaatgctggtccgaagacacccagtcccggacccacgttaccgatacttgatacagatagtccgaaagattcttccagtccgatgcccatgcacatcagcgccagccagcataaaaagatacagacaaaataaaagaacacaaacgtcatcaccgtggcaagcgtacgctgtgacaccgccatccggttcatctttaccggcaataccgctctgggatgcatcagccggtggaactcatttttcacgttgcgcaacaaaagcagcagacgcacattcttgacaccacctgccgtagaaccggcacagccccctgccaccatcgtataaataagcagcagccacgtgaaaggaggccacatattataatcgtccgtagcaaagccgcacgacgtatgaatggacgccacctggaaaagcgatttccggaaagcttcctccaatccataattattataccagtacaaggccccggtaattatcagtgtcaccgctccgatggaaatgagatacagccggagctccccatccttaaacaactgtccgcaacgccccttcatacacatgaaatacagcgagaagttgatacccgacagaatcataaagatggcaatcacatattctataaaaggagaattccagtaagccacactggcttgcttggtagaataccctccggtagccgtcgtagaaaaagcatgacatgcggcatcaaacaaatccatgccgccaatcagcagcagtacaatttccgccacagtcagcacgagatataccgtccacaggcattgcgccatgacgctgattttcggatggatcttgtcgtgcgtcacccccgtagcctctgccgagaaaagcacctgattgcccactccgaaaataggcagtacggcaatcgtaaagaacacgattcccaatcctccaatccactgcgagaagcttcgccagaacagcatgccgtgcgaaagtgcttcaatatcatccagaatggtggctcccgtagtggtaaaacccgacatggtttcaaaaaacgcgtcggtcactgacggaatactcccgcttatataaaaaggcagcataccgaaacctgtgaaaagcagccacgtgaacgccacgatgcaatacccgtcgcgtcgtgtcacccggttttcggctcctcttcccaacagaatcagtccgcttcccacggccatattaatcaatgtcgtgtaaataaaataaatatagtcttcctccccatagcacaaggaaacacctgcacatgccagaaacatcattgcctccataaagagcagaatgcccaagatgcgaagaatcatctttctgttaatcaaactattgcctcggttggcagttacattgaccgccgtcgataaaaaatcttccatgtagctttatgtgttttactagccaagtttccccttttttaattcctcatccaaaaaagaaaaaacatacctcggactttgagtataaaaagaagtccgctcattcattaccttgccataaatttcagaattaaaaacagttgcaagagcctgttccaatgtcagtttatcattttgttctatcagaagacacgcaagtttctttatcatgtctgccatcatttctgttttctcattcataccctctgtaataatcttatcgcacgctccgtaccaaaaaagtattgtatagtaatacctttcatatatttcaaattcctgaccaaagtcggcaaatcaatagaatgattttcataccgccataactgaacccccacacggtcatccgctattgggcctatcacaatatcatatccatgcacaggatgacttgtagggttatttctattcagaagaataaacttcgcccattcttctgaatattcttcaaacctaagcacattcaatccttcccaaacctcctcaacttcataagttaataccacaggtgagccacagcctaattgctcaacctttacatttgccatattaagcgcttgataataatcagctgaaagataaaaaccccgtccaaaatctttattgggtttcgatttcaacaaatcaattctatcaaactccttattcataccatgatataatttcataccaactctcctccttgtcgacggcaatattccgcaatatcatccaccatcgatgtaaacgactgcgtatgcacataatcataatgcctatcaataaaatcaatacctttaaatctactcaaataattaaaggcctgtttcatcgtcagcccatatttatgtccaaactcaaatagaaaaataaccgtccattccaatttttccttcacatcatatttcatagacatagttttattgcaaatttacaaaaattctcatgaatcacatcgggaaacacaagaaatgacaccatagaaatgatgccagacagaaaaacgcaaatctacatggccgtatcctcccctacaggaacgggttccgaaaccgtgacacttccgggccgccgcttgacgggttgtcggggttggcaccggtttttcaaactttctatatacaggtgtggaaaaatataagcg

SEQ ID NO: 3751 - DNA, 1445 bp, Unknown
  gut microbiota DNA sequence
gaaagactttgattgtgtaacgacgatttgatatggaagaagtaaataaaaaaatatttatagaatacgtatcccacttgtatagtaccgataaaagctatgaggttattggtaaaaccattaaagctgtaaagttattccttgaaagtgattatcaggtaaaccgtaaaggatacaaggcttatatcagagagaatgccgttgaattatctgataagccatacattaaagatgctctatgtgggttccttaattatcttggtattggatattcacgcacacgaaaagagaaatatgttaaacctctggagaagctaagcgatgtttcagaaaagaacatgaaactgatgaatgaatttgtgtattaccttacgcaggatgaagattactctccacacactattgaaatatattcattttcaattaagaaatatttcgaatacgccaacgaggtatcagttgacaattacaagcgttttgtacggatgctggaggatgagggattgtctcccagaacaatacgcctacgtattaccgcacttgaacgtttcagcaaatggatgaagaagccgatagagttgaagcgaccaaagttcaaaaaggagttgaatacggagaatgttccgacagaagccgaatacaacaggctgcttgagtatttgaaaacttgtcctaacagggacaggtacttcttcatcaagatactggctacaaccggggcgagggtaagcgagttcttccaattcaagtgggatgacatcatttccggtgaagtcactctaaagggaaagggaaacaagtaccggaggttctttttcagcaggcagttacaggcggaagtaaaagcatacgtaaaggagagtcacaagactggatatgtcgcagtaggtaagtgcggaaggctgacacagagaagcttgtgccagtcaatgaaagactggggcgataagtgcggaatagatagaagcaagatgcatcctcatgctttccggcatttcttcgctaaaatgtatctgaaaaagaacaatgacgtggtacagttggcagacctgttgggacacggaagtattgatacgacaagaatttatttacagaaaagttatgacgaacagaaaaaagaatttaatagaagcgttgtatggtagcttcatgttcatggataaccttccggaattgatagaccgggaaaacatttacgatgagaccggacatgtggatttggagtttatgactgcaatcctgcaatggatgtcaaggatggcagagataagtgtgaaagtgcagaagtcgttgaaccgtctgttggggtgtgacgaactggagcagaacaacaagcgcaataaagatgattcgggaagtaaatggagtgtggaggaaatcctcatgcactgcacgcttgaggacaatattttaaaacttcctcaagtacaatttaataagaagtc

SEQ ID NO: 3752 - DNA, 34907 bp, Unknown
  gut microbiota DNA sequence
aactttgtcaggaattaatcttcaaactgacaactattttcagtacacttcaaacgcaaggacgtttcaaagcaaacgcaaggacatttggattcaaacgcaaggacgttttaccttaaacgcacttgcgttttttatccctctttccgtacttcttgaagaaattattctacattttttctgcaaaacgcttgcatattcaaaaataagtcgtacctttgcacccgtgattgagaaacacctcaacacaaagtcaggatggcccgttcgtctatcggttaggacgcaagattttcattcttgaaaggggggttcgattcccccacgggctacgaaaaaaggtctgaacttttgttcagaccttttcttttatactctactctgattctatcagaagattacacccagacggaaaccggcatgattctgcccctcaatgtcgcaagtcaatgtctgcgtcttgttcgtagcataactgtagtagccggctacatggaatccccatttctttcctgtcggataaattttcagaccgatttccggagaaacgtagaatccccatgatttgtcgtacacacctccgctaccaaagtaagtggtattacgggcaaacatagcacctgccttcactccgatgtaaggctttacataacggttggtagagagattatatgcccccatcacaccaaacggcacttgaaacgccgaacgctgctgatcggtagtgagtgactccgtaggtgacaatgacaacgtctgacgtcccacatacttatgattggtatggaaagaagcaaagactccagcttcccaacgaggcgtaaactgatagcccaactcatagctcattccccatccgctcaacttatctgcaaaatcagtggaaaaaggtgcattcatctgccagtccaccttcaaagtagtcttgctgatatcgtattgcgaaaatccttttacagccactcccagacacataaaggccagcagtgtcatctttttcaatatatttatcttcatttcaaattcctcctctaattaattaaccgatttgatataaggtgactgctcaaaagcctgtaccaccgaattctgcaacatcatctgattaaactgtccgctgtactggaatcctgatgcgctggcataccacaccaccggaagatttttctgtgtgccgtcctcatcggcagtcaggtcgaccatctccatcaccaaggtattggtattataggaataggacacaggatacggataataccatccggaccaaggaccccagaaaccataatcccaccagccgccccaatagccaccggtaatgacctgagttgtctgagccacgtaggaaagctgcaagcccacattggcttcttccttcttttccggatcaaggatacgggtgtatccgcgtgcatccatttctgcggcaaccttattaataatcgcctttgcattttcatccttccagtaggtagcccgatgaccacctgcctctaaaatactgtcaggcaagaaatacgttttataaccaccaaagtcggcatccttgtcataatcggtgtagaccaccagatccgcgtccaactgattcatgtcagggtctttctcacaagccgacaaccccaacaacagacacgcaaaaaacaacatctttctcataattcatcttgttttatcaaattgaacgtcctttaaatactgagctcttgaaagccggaagtatcaccccatttagggtcagacgattggaattaaaattcggagtaatggtaaccgtagcattattcgttcccttcggcatgctgatgtccagacgagccgaaatgccgacacccattacattcatggataaatagagcgtccccctcttgtcagtcctcatctcataagaagagacctttccatttaccgttacgcctcccagtccgttaggacctgccgccggaatattgaaagccacctgcaccactgcatcttctccatctacagacacaaagttggtattcgatgtgacgtaagccgtctgcccatacttgaacaccacctggtctgcttcaagggtaaacttctttgcattgatagcttccactgcttctgcatgctggatactgtctattttctcttgaagagctttcttttcttctttggtcaactcaacttcttgagcctgaatatgtccgaccatcaaggccagtgcgcatatcagaattgataccatctttttcataaatctatgtctttaattgattacatactataaacaacgaattcagcgttttgctgcataattcttgtttaaaaaagtataatgtatttcccccttttcaaataaaattgttatctttagaatatataaagaaaaaatctattcataacctttaaaaaaccgtaccatgacacacatcagcgaaataaccttattgattgccgtcattgcactggccctctggccggtcgtattgttcgccctgcgcttcttgcgcgagcgtcagaaacggttggaatacattgaaagaatgacaaaagacgaacaggacgaagtcacgacaaaagacctcgtcatcagcgtactgaagaaaataggctgccagcctaaggtgaatgaagaaaatcacatcacctttaaatatcagggagacgatttctatattgcggcagaagaagagaaccgatttatcatgatctggaatccatggtggggctccatcaatgccgacaacgaagcgcttccttatctgaaagagattatcaatttggccaatgtaaactcactggtcactaccgtctatatggcggacgaggatgagaagaccatcggactacactcccgttgccacacgttcttctctcccagagaaggagagctggaagaacacatgaaaatgctgctggactatttctttgacatgcacaatgtgataaaggacaacatgaaccagttaggccaggcagccatcaacgaggaagagaaaaaagaacgcgtaaaagtaaaaggtttctccgcctataaggacaacaccatgcctattgaggcgaagaaggaggaagagaagaaggagtaggttcttcgtcgtgcttccgcatactgaattcacaaccgcaatactgctggttatagaaattatattccttgataatggctatacggcgttcactcaagccgcctttgcgccagttctgttcccaccaggttacgtcgggataagcagctacagcccaatgtcctgcttcattaatctgctccaggcttttccagcgagaggaagctaacgtggtcgtgatgactgagaaaccgtgttcatgtgcataacgggccgtatcggccagacgcattttaaagcatttcaggcaacgccctccgcgctccggttcgttttcaagtccggccaccgtacaacgccagaatgcatggtcataatctgcatccacaatatccaagcccaacgactgggcatagcgggtacactcgtccttacggatattgtattcctccaacggatagatattcggattacaataatagatagtagggcgtatgccatgattcaacagacattcgataatggccgatgaacacggtgcgcaacaggtgtgcaacaagactttgtcggatccacccggtacttccaattcaaatttcttctttttcatcctttcactcacctttattcacacgaatcagacactccctccgcataagaagcaaacaagggttgcaacagttccggtatatctatcccctgctcgcgtattcccttcaggcagctatgcgcttcttttgtcagagagaaatacatttgccgcttgtctttctcgcccaaggcacgcaccaacagattccgctcttccaccgcacgaatcaccttggaggcatgcgaaggagtcagccccgtacgctctacaatcgtgctggccgctacccgttccttaccgatggcacataacaccatagcttcgttcagcgacactccatgcgactgcatcaaacgggattcaagttcagagagagctcgaaagagctctctcatcacacagatacattttattttttccatacttaaataaacagatttacattggcttcctcagcacggtccatataggtcgctaccccaccgatggtgacgttgtccagcagctcttcctttttcacgcccattacgtccatcgacatctggcaggcaatgaattctactccattatcaatggcctgctggcgaagtgattccaacgaatcgattcccttacggttcataatgtaacgcatcatcttcgtacccatacctcccatgttcatctttgaaagcttgagtttccgagagctggaaggcaacatcatgccgaacatttttccaaaaatatccttctgtaccgacggtttccgttccttcttgatggcattcagtccccagaaggtaaagaagatggtcactttcttgcccgtagccgccgcaccgttagccagcacaaaggtagccaaagttttgtcaaggtcatcactgaaaaggatgaaagtttttcccttctctcccacgtcctgacgggaagcctctatggcacaaggagtcgctttctctaccactaccttatagattcccccttccgacttaaaggaaaggaagcggtttccggtagtacggcaccatgcctctgcgtctctcgggaagccggcatccgtagcatgaatttccatctgctcaccggctttcagttcctccatcccttttttcaaacgcaagatagggccaggacactgtatgccacaggcatctactacatgtacctttttgcagtccgaacttccttcagccgtttcacacgagcaggctacggcacatgtttcttccggctggcaaaccggagtaaccgctgcattgtaggtcttgataccacctatcaggttacgcacatccttataaccgttttctttcagaatgttagaggccagataaccgcgcaagccgactccgcagtacaagaagactggtttgtccgatggaatttccttcatccgtgaacgcatctcatccaaaggcacgttcaccgctccagaaatgtgccccagttcatattcgtcttttgtccgcacatccaccaaggtcactttagtcaaatcggcctgctgcaactctctccaataaagaggagtcatcttgccgttcaagatatttccagccacataacccgacactgctaccggatctttagctgaagagaaaggaggtgcgtaggcatgttccagttgcatcaaatcatatacggttcctttctgcttgatgaccagtgcatattcatcaatgcgcttatccactccattgtatcccacaatctgtgccccatacaaacgaccgccttcaggagagaaagtaatcttgatgtccatctgcagggaaccgggatagtagccggcatgcgaaccagagtgaatggttgccgacagataaggcataccaaaagctttcagacgcttggccggaagtcccgtagaagccacagtcaagtcaaatactttcgctatggcagtcccgatagagccttcatatttcacccggttgccaaatgtcatgttgtcggctacgatacgtgcctgacgattggccggtccggccaggaagttcaaccacggcttaccggtaatcggatgcggatattcaatggcatcacctacggcatacaccgactcatcggaagtctgcaggtattcatttacataaatacccttcatttctcctaacttcagtccggcttctacagccagacgagtttctgcccgtacaccgatagaaagaataaccagctgagcttccgcctgtaaccccgactggaatttgactctcagtccggaatcggtcttttcaaaggcttccactgcctgtttcagatacagtttgacccccttctgttgcagatgaccgtgcaccagcgctgccatagagaaatcgatcggtcccatcacctgatctgccatctctactacagccacctcaataccggcatgatgaaggttctcggccatttccaacccgataaaaccacctccaacaatcaccgctttctttatttcatgactctgcatataagccttgatgcggtctgtatctgccacatttctcagggtaaagattccttcattatcgattcccggcaaaggaggacgcactggcgatgcccccggtgaaagcagcaatttatcgtatgtttcagtatattcttttccgtccgaagtacgaaccttcacttctttacgggcagtatcaattgccataacctccgaacgtacccgcacatcgatgcggaaacgagtggagaatgcttccggagtctgtacaaacaagcggtcgcgctcctgaattaccccgcctatataataaggtaaaccgcaattggcataagagatatattctccacgctcaaacaaaatgatttcagccttttccgtgtttctccgaatacgggcagccgcagtggctccacctgctaccccaccaacaattacacacttcataactatttattttctttgttattattttctaatggaaactttttgcaaagaaaataaataattacataaagaataaatttccaatggaaaatattcaccaattaagcattattaagggaaagcgtctctttctaagctaatttctggtaagccagtcgcggagttccattacgcacatagataattccacaatacacaaagcctgtagaaagcagcagatgttgcatcaccttgttgtctgcatgggtatcggcacgcaggcacggccactgacggaaacaccagtccacacatagttttcctatccccttgcagaagccgtcggatgccagccgatgaatcacataataaggagagtcgtctcgccattccccgttttcaatgcgtgcataggtcggatcgggtccctgaatgaaacagaaagtggccactgctcttccctcttccgttacacacacataacagtgagaagcttctatttcctcctgtatcagttcccgctggggatatccgttaatccactgattagggtttcccgtgcggcacatgaaacgacgggcttcttcaaatatctccatcaaacggtccaaatcatccaatgtagccttgcgtatctgtaaattcataagtcttttctattttgataaaccgacgcaaaactaatggttttcttctgttttatagagcaggtttcttgtttttttgaaataatgttgtacctttgtgacaacttcaaaaacaaatggggcattagctcatctggctagagcgtttgactggcagtcaaaaggtggcaggttcgagtcctgtatgctccactttttcttttctactccacttgacttttccctgattaaatataaaaacagaccttgtctgacttattcaatttattattatgtacagtattttaatcatagaagacgataaacgagtagccgatttgcttaaaaccggactggaagaaaatggctatcacaccatggtggcatacgatggagccatggggcttcgtctgttccaatctcactcttttcagctggttatttcggatattattcttcccaaaatggatggctttgaactctgcaaagaaatacgcaaagcaaatccgcatatccctgtacttatgctgacagccttggggtcaaccgacgacaaactcgacggatttgatgcaggtgcagatgactacatggtaaaacctttcgacttccgggaactgaacgcacgcattaaagtgcttctgaaaagaaaagcagaagcaactgtatctgttgttgctcccgagaaacttacctacaaagacttgcagattgataccaaccgcagggaagtgatgcgccaaggtagcctcatccgcttatctccaaaagaatacaacctgcttacctacatggtgcagaatgcagaacgagtcatcagccggatagaaattgccgaaaaagtctggaatacccactttgataccggtaccaactttatcgatgtgtacatcaattacctgcgtaaaaaaatagacaaagactttgaaaccaaactgattcacaccaaacctggaatcggatttattcttactgacgaaaagccatgaaaattaaaaccgcacttacgctcaaaaataccggagtcatagctgtggtatttctgctttacatgaccttaatctatctggtcagcgagcatatccgaagcaataccttcttccataacctgaagagtgaagctgtcactaaagtgcatctgttcctgcaaaaccaggtagatgccgacatcatgcaatccatctacctgaataataaggagtttatcaatgaggtggaagtggctgtatataccacagactttcacatgctctaccacgacgccatcgacaatgatattgtcaaagagaatccggaaatgattgcccaaattctccaacaaaaggaaattgaattttatatcgggaaataccaggccgtcgggatggtttatcctttcaacggacagacttatattgtgacggccgcagcttacgacggttacggacacaccaacctgctggagcttcagaaaacactggtcatcctgttttttatcggtctcttacttttatttattacctgctatttcctggttcgggcatctttaaaacctatccgggaaatcgtaaaagaagcagaaacgattaccgcttcgcgtattgaccagcgtctgcctgtaagaaacgagaaagacgaattaggggaactaagccaggctttcaatgaactactggagcgacttgaaatatcattcaactcccagaaaatgtttgtcagcaacgtgtctcacgaaatgagaaccccgctggctgccctcattgcggaactggatttgtgtctgcagaaagaccgtacagaaacacaatatcgtcaagccatacagaacgtgctacaggatgcacgacgaatgacaaaactgattgacgggctgcttaatttggctaaagctgattaccagaaagaacagatcaagatgcatgaaatccggttggacgaattgttgctcgatacacgggaaatcattcttcgtgcccatccggaataccacatcgaactgatttttgaacaggaagatgcggaagacgaccggatgattaccgtcatgggcaatgattacctgctaaccattgcctttgctaacttgattgagaataactgcaagtattcggacgacaaatcttctttcattcagatttcctactgggataaatggaccattatccgcctgtcggatgacggaattggtatgtcggatgcagaaaaagaaaagattttcaccttgttctaccgcggagagcaggaacagcatgcggaaggacacggcatcgggatggcgcttgcacagaaaatcatcgccctgcatcagggcagtatagccgtacattcaaaacaaggagaaggaacgaccttcatcattgaacttcctcacatttaatcttttggcacatccattcaaagaaaaataaactccatcagagtggtattagaaaattagtctcacaaattctaatagttttctaataccactctaatatttctctaacagcctctgtcgggggcattgcctacttttgccacgtgaaaagaaaacatagtaatcaccctatgaattttaatgatcatgtggaagaaaagaaaaagtagcaccacattcaccttcaatggcgaaaaggtatttttagcagcaagtcagacactgggcacagttttcagctatttccagacaagccgtatcggacttacacaagaagaagtggaggccagacagtctctctatgggaagaacgaagtggaacatgagcagaaaaagaaccccatatcgactttcatcaaagcttttatcaatccgtttatcggcgtactcacggcgctggtcatcatttcttttgtactcgacgtactgttggccaacccaggtgaacaggactggacagccattataatcatcctgaccatggttatcgccagcagcatactgcgtttctggcaagagtggaaagccaatgcttccagcgaagctttactgaaaatggtgaccaatacctgttacgtaaaacgagccggtaaccaggacgaagaaatcaacataaccgacctcgttcccggagatattgtcatgattgctgcaggagacatgattcctgccgacatgcgtatcattgaagcaaaagacttgtttgtaagccagtcttccctgacgggagaatcagatccgatagagaaacgtccggaggccaaaggaaacaagcacagcaaaggaagtgtaattgagctggaaaacatctgctttatggggtccaacgtagtcagcggatctgctaccggtatcgtgtttgcaaccggcaacagtacgtatttgggcaccattgcccgcagcattgccggacaccgtgccgctacagctttcgacaagggaatcagcaaagtcagtttcctgctgatacgattcatgctcatcatgattccattcgttttcctggtaaacggtgtgactaaaggcgactggctggaagcatttatctttgccctatcggtagctgtaggccttacccctgaaatgctcccgatgattgttactgccaacctggccaaaggtgccgtagccatgtcaaagaagaaaaccattgtaaaagacctgaatgccattcagaacttcggggcgatgaacattctctgtacggacaaaaccggtacccttacctgcgaccaaattgtattggaaaagtacatcaacaccgatggaagcaatgacgaaagccgacgtatcctacgccacgcttatttcaacagtttcttccagaccggattaaagaacctgatggacaaagccattctgtcgcacgtaaaagacttgtctttggaatacctgaaggataattatacaaaagtagatgaaatcccgtttgattttacccggcgaagaatgtcggtagtggtagaagaccatcaaggaaaacgacagattatcaccaaaggagccgtagaagaaatgctggacatctgctcacatgctgagtttgatggaaaggtataccccatgaccatcgaactgaaaaacaaggcacgcgacatcattgagcagatgaacaagcaaggtatgcgtgtcattgccgtagcccacaaaagctacctggacaaaacttgcgatttccgtatcgaggacgagaaagatatggtactgattgggtatctggctttcctggatcctcctaagcaatcggcagccagcgccatcaagcaattgcataaacatggcattgaaatcaagattctgtctggcgacaatgatgcagtggttcgcaccatcgcccgccaagtgggtatccgcaccgacaatgccctgacaggccccatttttgaaacgatgagtgaagaggaaaaaatgaaagcagtcaaccagacgaccgtattttccaaacttactccaatacagaaaacggaaatcatcaccctgcttcaggcgcaacagcacacggtaggcttcttaggcgacggaatcaatgatgccgcagcgttgcgtcagtcagacatcggtatctcggtagattctgcagtagacattgccaaagaaagtgccgacattatcctgctggagaaaagtctgatggtactggaagacggtgtactggaaggaagaaaaacatttggcaacatcaccaaatacatcaaaatgacagccagttccaacttcggaaacatgttcagtgtaatggcagccagtgcattccttcccttcctgcccatgctccccatccacctgctgattcaaaatctgctgtacgatatttcgcagaccacgattccgttcgaccggatggatgcagaatacctccggaaaccacgtaaatgggatgcctccgatttgagccgcttcatgatattcatcggccccatcagttccattttcgacatcgttacctatctggtgatgtggtatgcgttcggatgccaaagcatggaacatcaaacgctgttccaatccggatggtttatcgaaggcttgctgtcgcagaccctgattgtgcacatgatacgtacccggaaagtccccttcatacaaagctgtgcctcctggcaagtaactggacttaccctgctgattatggccatcggtatcctgctgcctttcaccccgtttggaagctctatcggactggaagcgctgccattaagctatttcccctggctcttcggtatcctgttgtcctactgcatactgactcaattaattaagaactggtatattcatcgttttaccaaatggttatgacaagattcatgaaactgttcctgtccctcgccgcagtgtcctgtcactgcggcctggctcaggaacttcaagtaagctacaccacagaactacaaagcgatttcaaacaaggaagtaactgggttaatctgctaagactggatttcactcattcattaggcaaacacacgacattacaagcctccaccatcagtacagccagaacccgcatcgaatcactggctgatgattttcagaccttttccaacattgaagaagaaaaccatccgcttgccctcgctacattgggcgtccagcaacagttcggtcattcctcgctctttttcggtatccggaacttgaatgaagactatttcacttcccctgctacctcgttattcaccaacagttcatgtggtatcttccccaccttgtccgccgattaccaaatagccaattatccggtagcttccgtcggactgcattatgaattgcaattcacacgatggtccttacaagcatcggcatacaacggaaaaggttactaccggtttgccggaaaagaaaacgtattccggttctgcccgcagcaagacggaatactcagtgtcacttcactaaactaccagcaccatgacagcaattatcatgtgggctttgctctacatagcggcatgtatatggactatgaagagggaactccagaaaagacagaaaaagaaaggagaaaaataatttggggatatgcagagcaacgtcttgctcccggtctgcatgcactcctgcaaggttcattccagtcaggtgcctctagaggatgcaaaagttatgccggcgcaggtctcacctggcaatgtggaaaaacagaaggcggactgttcaccgactacgcccgattttccccttcatacgaatgggccagtgaatttacatggaaaatcccctgttcaggcaacggatttatacaacccaccttacatttcattcagcaagcgggagcccactatctgataggcttattgcgcttcagctatgtgctcccgactacctgacatttattattttacgacaaattcatcagtaaacaagaaaccgccggcctcaggattgatatcagcctgcacgcgtacgtaacgagcctcacagctacctgtccagtcatacgtctgaatggtcaactgttcgtccgtaatgggcagtgtagtagtgatgattttcaaaagtgtatattcttttccatcgtttgaaatcaggaagctgactttctgcgggaggaacacccccggacctctcaactgcatgaaatcaatggaaagctgctgaataggttgtgatttttccaaatccacaatcacatcggccccttttccaaggaatccctgccagcgctggtcggtatatacccaaccgccatgtatgccgttagtcaatgccgattctcctcctgccggataagaatccgaataaggacgtacatattccaccttcttcccctttgccaaatgattatccacgctcaatgctaccggacggttacccacctcattttgcaagtcaaaagtatgataacccattgagttcagcacctttacttcctgtaaagcctctgcatggaaacgtttccagtctttctgctgcggatttgtccaggcaacttcagccaaagccagcaaacgaggataaatcatatattcagcatgctcgggtgtcggtatatattccgtccacacatttccctgtacgccccacacgcaatccagtttatcagcagggaaagcctccgtcaccggttcgtatgaataaaccttttccagcgggaggtatcctccgatggcttccggctgcgtacgcggtgcatcctggtagctgtcaaaatagcaatatgctcccggtgacaagatggtacgcaatcctctttttaccgattccgcacctttatcttctccacgccacaccgttacagcagaagtttcatccagttcgcctgtcagaatctcatcccagccaatcatcttgcggccgttctctttcaaaaacttctcaattctggatacaagatattcctgcaattcaccttcttccttcattccctctgctttcatgagtgcctgacagtcgggacattgtttccaatggttggtacttgcctcatctccaccaatatgaatgtattctgaagggaacaactccatcacttctttcaatacattggtcaggaactcataagtaagttcttttcccggacaaaactctccaccaggtttcaaatcacctccacaagccagttgcggaagagctgccaatacttcttccgagtgagccggcatttcaatttccggaatcaccgtgatatggcgctgacgggcatattctacgatttctttcacatcttcctgcgtataatatcctccggaagctccgggagcatcttgtctgcaatacgtacgtccgccgttccaccaacttttccagtctgggaaaggacgataggccgtttcacgcgtcagttccggatatttcttgatttcaattctccatccggctccatccgtcaagtgccaatggaagcggttcagtttataccgtgccagtgcatcaatctgtttcttgacaaattcttttgtatagaaatgacgtgacacatccaggtgcatgcctcgatacgaaaagcggggagcatcttctatcgtcacttcaggaagctggtacgtagcatttccactctcacgcgccagctgcacaatagactgaaaagcataaaacagccccgaagctgaagtagcctcagcctgaatacctttttttgtcactttcaaacgataagcttcttctttcatcttcgcattttccggactgacaagtttaaaagtaatgtcagcctttcctttcttcttataagtcagcgacaaaggagagttactcacataagatacaaaatcgtctttatcagttcctgtcagattacatgagaaagaagcctgtgtacgaagcacaaaatgaccgtccccacacaccatctgctgaggattaggaatcacatacgtgtcagataccgaagaagccatggcagaaaaagccattgccacacagaaataaaggaataacaaggatttcatcttatcaattattttaatatgaatttctttcatgcatttttaaagttaaccatttctctcctaaaaaacaaatcagtgccaacttttctgtttttcatttttgagaaagaacaaaaaaaattctcgtaaaaccttgattttacgagaattactatttccttgcggagagacagggattcgaaccccgggtacctcgcggtacaacggttttcaagaccgccgcaatcgaccactctgccacctctccagaactcttcgtgagagttgccttgttttttcaaaggcgatgcaaaggtacgcattattttgaaatctgcaaatatttaccgccttttttgattattttttttcattgtcgtacctttgcaggcagaaaaaacgaaactaacaagccatgatataccctcataatttcgaacagaagattggattcgaccagatacgacaactgctgaaaggcaagtgcctgagtacattaggcgaagaacgagtggacgaaatgactttttcggacaattacgatgaaatcaaccaacgcctggagcaggtggttgaatttgtgcggattacgcaggaagaggaagattttccggcacaatatttctttgatgtacgtccttctttgaaacgtatccgtgtggaaggtatgtatatggacgaacaagagctgttcgaccttcgccgttcactggaaaccattcgcgacattgtacgattccttcagcaatctgacgaagaagaggaaacggaaaattctccttatcctgccttgcgcgaactggcgggagatattttagtattcccccaacttatcgcacgtatcgacagcatcctggacaagttcggaaagataaaggacaatgcttctgcggaacttctgcgcatccgccgggaactctcggctactacgggaagcatatcacgcagcctgaacagtattcttcgtgctgcacaatcggaagggtatgtagacaaggatgttactcctaccatgcgcgacggacgcctggtcatcccggttgctcccggcatgaagcgcaaaatcagaggtattgtacacgatgaatcagccactggaaagactgtatttattgaaccggcagaagtggtggaagccaataaccgcatccgggagctggaaggagaagagcgccgtgaaatcatccgcatcctgacggaattctcggctacggtacgcccgcaagttccggccttactctcctcgtacgaatttttggcagaaatcgatttcatccgtgccaaagctttgttcggtatagatataaaaggattgaaaccgtcgtttgagaacaagcagattgtcgactggtttcaggctgtgcacccgcttctgcaaatgtcgctggccaagcatgacaagaaagtagtgccgctggacattattctgacacgcgacaagcgcatcctgcttatttccggaccgaacgctggtggtaaatctgtctgcctgaaaaccgtgggactgctgcaatacatgctgcaatgcggtatgttagtgtccatgcacgaacggagccatgccggtatattcagccacatatttattgatattggtgatgagcagagtattgaagacgacctgagtacctattcttcgcatctgaccaacatgaagatgatgctgaaatcatgcaacggcgaaagtctcatccttatcgatgagttcggaggaggtacggagccacagattggcggtgccattgccgaagccgtactgaaacgcttcaacctgaaaggtacgttcggcgtgattaccactcactaccagaacctgaagcattttgccgaagatcacgaaggagtggtaaacggagccatgttgtacgaccgccacgagatgcgggcgctgttccagttgcagattggtaatccgggaagttcgtttgccgtagagattgcccgtaaaatcggtttgccggaagaggttattgctgacgcatcggaaattgtgggaagtgaatacatccagagcgacaaatacctgcaggatattgtacgcgacaagcgttactgggaaaccaagcgtcagaacatacgcaagcgggaaaaacagatggaagataccatcgcccgttacgaacaggaaatacaggagctggaacgcagccgcaaggaaatcctgaagaaagccaaagaagaggcagaacggttgttgcaagaatcgaatgccaaaatcgaaaataccattcgtaccatcaaggaagcgcaggctgaaaaggaacgtacccgcacggcacgtcaggaactgaccgacttcaagcagcaggtagaaaacctggaaaaggcggctttggaagagaaaatcgcgcgcaagatggaaaaactccgcgaaaagcaggagcgcaaaaaagacaagaaagcgcaacaagccaatgctcctgaaactccggttgctcctaaggtacgccccattgaagcgggagactatgtgcgcatcaagggacagaccagtgtgggacaagtcatggaaatcagcggaaagaatgccgtggtcatgttcggactgatgaaaacaaacgtgaaagccgaccgactggaacggacggatgcaccgaaggctgccccgttatctaacaaagcaacttttgttagcagcgaaacccaagaccggatgtacgaaaagaaactgaatttcaagcaggacatcgatgtcagaggtatgcgcggagacgaagccatacaggcagtcacctatttcatcgatgatgctatcttggtaggagtcagccgcgtacgcatcctgcacggtacgggtacaggtattctgcgcaccctcatccggcaatacctggctaccgtaccgggagtagcccatttccaggatgaacacgtacagtttggcggcgcaggcatcaccgtggtggatttaaaataaaccctacgggatttctgcacatatatgcgattattgcgtatctttgcagaaaacttatacctattttttagtatgaaatcaatcagagaattatatcgcatcggcacggggccgtccagcagccataccatggggccccgcaaagctgccgaacaatttcttgcccgtaatccggaggctgcctcattcgaagtaactctgtatggcagtctggctgccacaggacgtggtcacatgaccgatgtagctattttggataccctgcaacctcacgctcccgtagaaattctctggaaaccacatattttctttcctttccacccgaacggaatgactttcaaggctttcgatgcacagaagaaaaagctggacgaatggaccgtattcagtgtaggaggtggtgcattggccgaagaaggacatgaccgcacagccaccaacgatatttacaacatgaataccatgagtcagattttgtactggtgcgaacacaccggacgcagctactgggaatacgtggagcaatgcgaaggtccggagatatgggattttctggcagaggtatgggagaccatgaaagccgccatccatcgcggactggatgccgaaggtgtattgcccggcccgttaaatctacgccgcaaggcatcggcttattacattcgttcgaaaggctataaagactctcttcgctcacgcggactggtattcgcatacgcactggctgtcagtgaggaaaatgcttccggaggaaagatcgtcaccgcaccgacctgtggagcctgcggagtggttccggctgtcttgtatcacctgcagaaaagccgcgacttcagcgacgcacgtatcttgcgggcattagcgactgccggactggtgggaaacatcgtcaagcacaatgcttctatttcgggagctgaagccggatgccaggccgaagtgggagtagcttgttccatggcatctgcagcggccagccagttgttcggaggcagtccggcccagatagaatatgcagccgaaatgggactggaacatcacttgggtatgacatgcgacccggtatgcggactggtacaaattccttgtatagaacgtaatgcgtatgctgccgcacgtgcactcgatgcgaatatctattcagcctttaccgacgggcatcaccgggtatcattcgacaaggtggtagaggtaatgaagcagaccggacacgacctcccatccttgtacaaggaaacgagtgaaggaggacttgccaagaattatcagcccatggaataagagggtaaaagaaacgtaaggacgccttctcaaaaacgcctttacgttttatcttaaacgcccttgcgtttgaaccaaaacgtaaaggcgttttacttaaaacgcacttacgtttttagctaaacgcaaaggcgttttttcgggacggtaaaccgtatcatttttctactctttcacctcaaaaatactgttgaaaatgactttcacctgtcactatgattctccgttgggaggaatcacactggctgccacggaaagcggactttgcggcctctggttcgacggacaaaaatatttcggtcacggactgaaagaagaggccatgacgaaggaaactccgttgctgcttcaaacacggcaatggctcgatgtttatttctccggccaacaacccgatttctgccctcccctgcaaccttccggcactcattttcagcagaccgtctggcaaatcttatccaccattccttacggagaaacccgtacctacaaagatatagccatggaaaccgcccgccgtttaggacggcctcacatggcagcacaagctgtaggcaatgccatcggacacaatcccatcagcatcctgattccctgccaccgcatagtaggaagtaatggaagcctgaccggatacgccggcggcatctcgcgcaagcagtcacttttagatatagaacatataccttattatataaagtaaaatcgtatgaaatcttaccaagcctacttatttgactttgactataccttggccaattcttccaagggaattgtgatgtgctacagaaatgtactcgaacgccatggattccatcaggtggacgacctttctatcaaacgtaccatcggaaagacactggttgattccttttccatcatgaccggaataaccgatgcagacacgctggagacattccgaaaagaatatgtcaaggaagccgaccagcacatgacggccaataccgtacttttcccggaaacggaagaagtgttacgcgccctgaaagccaatggagcccgtatcggcatcatctccaccaagtaccgctaccgcatcatggagctgatggggaaaatattccccgaagaattcattgacatcatcgtgggaggagaagacgtgaaagaagccaaaccctcacctgaaggtctgctgcaggccgcttcccgcctgaactgcccgaaagagcagattctctacctcggcgacagcaccgtcgatgcggaaaccgcccaaaatgcaggagttgactttgccggtatccttcacggaatgaccactcgcgaagagctggcagcctatccgcacacagccattttccccgatttacttccactgataaaaaaataggaaatatatccgtttttttcagataaatagttggttatgtaaatataaagccgtaaatttgcagccgattttagtccgtgtaggtaaaaaagtagctacagagaacagctcaccttacggaggaaacccgtttaatatttatttaaaaatgtacgtaatcgtagaaattaacggtcagcagttcaaagcagaagaaggcaagaaactgttcgttcaccacattcagaatgctgaaaacggtgcaactgttgaatttgacaaagtcttgttggttgacaacaacggtactgtaactgtaggtgctcctactgtagacggtgcaaaagtggtttgcgaagtagcttctcacttggtaaaaggtgacaaggtattggtattccacaagaagagaagaaaaggttacaagaaactgaacggtcatcgccagcagtttactgaattgacaatcaaacaagttattgcttaatcattaaaaacgtagaagaaaatggcacataagaaaggtgtaggtagttctaagaacggccgtgaatcagctagtaagagattaggcgtaaagatattcggtggttcagcttgcaaagctggtaacatcattgttcgtcaaagaggaacagttcacaacccgggtgaaaacgtaggtatgggtagtgaccacactctttacgcattggtagatggtactgtatgtttcaagaaaggtcgcgaagacagaagctatgtttctgtaattccttgcgctgaagcataatctactgaaaacgaattttgaaaagaggctgtctcaaaatagaattgcaaaagtaaaaatattacagattgaaacttagaaataaaaaatctcctgtttcagccttagtttactctaatgatatggctaaaagcaggagattttaatactataacttataaattataagtatgtctgtccaatttctctattttgagacagcctcatacaagctggatatacgggcataatcaacctccgcctgacgatacaatgcctccgtgcgctgcttctggataacaaaatcacgttcatcaatggccgcaatcagttgtcccttccggaaaaactgtccctgctgcacatcaaatgcatgcacaggccctcccacccgaaaagataattcagacaagcggtaaggctgcgaaataaacgtatagcaccgtgaagagggagcctccatgacttcggcatgaaccaccttcacgctgggaaaagaagtctgttcctgtggcgtacggctgcatgcgcacaagcacatccctgcaagaaataaaatctctgttttcattcttctacaatattatcattctacgccacaaagatagcaggccccatcgtcccctttcacgggaattattcccaagccgcgcctgaagtgactgaagcgtagaaaccggccacccaaacctttttcggtgcatttgcaggaagaggctaaaaaatgatttattaccatttgtgaattttttagtataagaattggcttaccttcgcagccaaattcaaaaacagagaaaagacatgaaagacagtattgacttcggaagtatggacattccgaaattattccggaaattacttatccctacggtgctgggaatgattttctcggccatcttcatcattaccgacggcatttttgtgggaaaaggtatcggcagtgacgccctggctgccgtcaacattacggctccgctttttctcatcaatacgggagtggcgctgatgttcggtatcggtgcatcggttgtagcctccattcacctgtcgcaaggaaaggtaaaggtcgcccgcatcaatattacgcaagcagtagtggtttcctccttattgctcatcgcctacgccgcagtcatcctctgcaacgtggagaaaattgccttgctgctgggaagctctccccgtctgctgcctctcgccacggaatacatgcactggtttgtccccttcctggtcttcagtgccctgctgagttccggcatgttcttcgtgcgactggacggctcgcccaattatgccatggtgtgcaacatcataccggccctgctgaatattggactggactatctgtttattttcgttttcaaatggggaatgttcggtgcggccttagctaccagcctgggatacatcgtaggcgccctgatgattctgatttacctgatgcagccgcaccgggtactgcacttgtgcaaagtgaaattatcatccaagagtctgcgtctcaccctccgcaacacgggctatatgtgcaaactgggattgtccagtttcctctgtgaagcagccattgccactatgatgtttaccggcaactacgtattcattcactacctgggtgaagacggagtagctgcctacagcatcgcctgctacttcttccccatcatttttatggtatacaatgccattgcccagtcggcacagcccattctcagctacaacttcggtgccggaaatccggagcgcgtacgggcagcctttctcctggccctgctgaccgccatctcctgcggtgtcgtggtatttgccgttacaaccctgttctccgctcaaatcacctcgtggtttatcgacagttcctatccggcacacgacctggccgtcaaaggacttcccctgtttgcttccggcttcgtgtgcttcggcatcaacattgtatccatcggctatttccagagtgtggaacgcgaccgtccggccatggccatcaccctgctgcgtggttttatcctcatcctgttctgtttctggctgatgcccatcctgtggggagtaccgggaatctggctggctgtccccgtttccgaactgctgacctttctttttgtcattaccatctattgtcgcagaaaacgaagctaaagatttattacctttgtgcctgcataaacgcagaaaagtatgaaagcttttattgagatacttcgtgaaaaatacggactggcacagccggaagccgaaaagctgctggaacagatggaactgctaacctaccggaaaggggaacatatcgtacgggagggagagcgtaactcttccttctatctagtagccgacggcatctggagaggacattatctgcgcgacggagtggacatttcgctctggtttgcctttcaaggtgacagtatcttttcctcctggggatatgtggccggacttccttctctggtttccatcgaagccatgagcgacagccgtgtctatcgtatttctaaaagcaagctggagacttttttctcttcttccgtcttgttcgccaacatcggaagagtcatctttgaacgccagtttctggacatggaaaactggatgataaacggaggtgctgcacaagccaaacagcgttacctgacactcctggagcaaaatccggaattattgcagcacgtaccgctgaagcacatcgcttcttatttatttatcacacctcagtcgctcagtcgtatacgggcagaactgagcaagaagaaataacggtatgaatacttatcgaactccagtgatggcattaatccaatatctaccgtcccggtatgcaacttgaatatttatttgatgcgtatacttcccggcctgataagtaacctgataattatcaggctccaacggaacaaccttcagactgtaaaaccacatactgtcgaaatcaaaattcgtaatcaaaaggtcatagcccccgaagccatcctgtagattttctaattctaccttcttgaattgttctaaagctgtgtgagacagatgagacaagcgaaaagactgcaacttggaattcaaatcgctacacatgctgcaataggtagccacgtaaagtttataaaaactttcgaccaatgattctcccgacgaactatctattttatatgaagctgtattttcaaaaccggtcaaccactcatttccatattgactaccattttcaataggggtaatatatactatcttacatttttcattcacacaccccacttttaatggaatctccaccagactagcactatctttttcattccaaagatagcttaccatataccaatcgtctgcaatttctcttacatttaatgtcttaattgcatctgaattcatatcctgcgcccgtataatcggatctcctcccgtggcattacgcattctttggagtttagcagccaattcttcagttaaatacttcttgcacagtatttcattggttgaatccacatttaaaatattcgtcatatagctcgtatagaacattttaatttcatctatgcatgcaccgaagcaaatagtactaaaacaaagcaacaaaacagatataaatataaactttcttttcatggtataatataattagactgcatctccagattgtacagctggaaacattcttgttcgcggttccttcaagctaatctgtacaaatatagaaaaatccccacaaagtatgaagactacacttttttatttgtcattttagccaatatatactaagtatcaaagcataaaaaaattccgtataaccctttcggattatacggaatctcttctatctatttgttacagattattttacttcctcaaaatcaacagtatctctgtatgagcaacttgcgtgaacgtgttgcaaatatagcggaaacccgaaaataagcatccataagcaaccacaactctttactgcaaaagtacagatttatttgataaatatcgtgatataaacacataataatcaaattaatggggcaattttaacataatatccggttttatccttacctttgtatatagaacttgggctttatccccaaacaacaaaaagaaaacgatgcaaattcataacaatacattgatagcggaatgctcgtcttacgatttcaaggaaatgctggaacgtaagaaggtaaagtcatggcttaaatctgtgtcggcttttgccaatacggacggtggcagcctattctatggagtaaacgatgacggaatgattgtaggcttggagaatccacaagcagatgccgactttatcagtgaaatgataaaggcaagacttgacccggtacctgacgtacaacttatcccgatcgaacacgaaggacgtgccttgcttgaagtaagagtaaaggcaggaacgctgacaccatattattattatcaagacggaacacgtacagcttatacaagagttggtaatgaaagtgtggagtgcaattcgcaacaacttctttcattggtattaaagggtacgcacatgacttgggattcgctgcctacacaagtggatgccaacaaacattctttcgttatccttgccaacactttcctcgaacaaacccatcaggaatggaacgataagtatttggagtcattcggacttgtcacatctgacggtaaactgaccaatgccggattgctgtttgtggataattgcactgtattccaatcacgaattttctgcacacgttggacaggactttataaagacgatgctatcagttccgtagaacatcgggcaaatctcgtattgcttttgaaatatggtatggacttcatcaagaactataccatgagtggatgggtgaagatgccgaactatcgcctgaatctccccgactattccgaccgtgctatctttgaagggttggtaaaccatcttatccatagagattacacagttatgggtggtgaagtacatattgacatctatgatgaccgagtagaattggtatcaccaggagcaatgcttgatggcacacaaattcaagaccgagacatatacaaagtgccgtccatgcgccgtaatccagttattgcggatatgtttactcaattggactatatggagaaacgcggttcgggcttaaggaaaatgcgggaacttacggagaaactgcctaatttcctgccgggcaaagaaccacaatatcaaacggaagcaatttctttctataccacattctataatttgaattggggagagaacggaaggatacctatagaagaagttgccaacagagtaaatagtagcttcgaaaagtactctatcgatgaagaatcttcggtgaaaactttcggtgatttacagaaatcttcggtgaaaaccttcggtgatttgcaaaattcttcggtgaaacaaaaacgattgggacggactgcacaaagcattcttgaccttgtaatatcagatggctctatatctcaagataagatggcggaaaaaataggagtcagtaaacgagccattgaaatgcagattgcaaatctaaaagccaaaggattgcttgtcagagagggagcagatcatggtggctattggcgtattgtaattaatcctaaagcagaagaatagacctatgggaatatatcttataccactctgtgttatagttgccattttggtaatcgcttttttgtttgcttctttacagcaagtaaaacataaaactcgatatatagtgctttatgcaatagccatcatcatgctatttgccgttattcctatcaatgaatatttgactaagtttacgcaaatttcaagtgaagaatacctgcttattttaatattcgatattgcggtgggatatttttgtatgtacattgcaggtttgctgaaattcaatcttcttaaacaaaaaaatcaagcattagaaaatgccttgacagaaaagcaacaaaaaaatgtaaatgctctattaaaacatcaaaatgaaaagcaaaaatcacttctcaaaggagaacttgaatggttaacagaaaaaatcaaagtatttactgaggaagagcagaaagctattcttgcctgtgcctgcgcatttgcagaacatgacttgataatcgctccatcaatatctattcagcaaaaagatacatgtagtcagcaagaccttatgtattttgtttgttctgcttttttcaacatgggtaagaagcgtaatgatattgtaagtttcttgtataaagtttttcctatatattttcctgcaggaggaagtgtgttggctaaaaaaatgccaggacaggaaagggtaaaagagagaagggagaaagaaaataattaaaaaaacaatgtcatattttaattgtacaacttcctataatataattttattggaagttacttatactatcaggcaatttatataaatttgcctttggattaaaacattttacttcatggctaatttaaacagactaaaagttgtgcttgtcgaacaacagaagacaggaaaatggcttgcagaacaaattggaaaatctaattgtactgtaagtaaatggtgtagtaactcagttcaaccagaccttaaaacacttaatgatatagccaaagttcttaatattgatgtaaaggatttgattgtcagcagtgtaaaaccataaatgagttattgttatggaagtaaacaagaaagagctcaaagaacaagagatacgcactctgttcattactcctgcactccaacaaaaaggatgggcagtaagtgtaaatatgcgtgaagagtactattttacggatggtcgagtacttgttatcgtcacctttatagataatagaatcagacaatgctgacttttttagcttaccttcttttatgaggcgttctttctctttgcgaatctcggcaagcaacttttcggcagttccttcatctgctatttgagggactaacttgccttgtattgcttcttgcagaattgatttttgtaaattccgtgccaaagaaaggtcaagttctgctctgtctgataaaagcttatttaatttttgtgatagtgtgtgcatcgctttatattgttatgcgatgacgagcaacttctcataataggaattcaacgcatttgattatcatcgtaatttatttggtgataacatattgtttcactaataaaaatagaaatggatattaaaagctttgaagagtatttgcgtcaaagtaatatggcagaaaacactatttcggcatacttgtatgccatcaaggagttctattctcgacacaaggatttgaataaaaagaatctcctgatctataagacttaccttattgagaagtttaaaccaaaaacagtcaatctccgcattcaggctatgaacaagtatcttgattgtatggggaaatctcgtttaagattaaaatccgtcaaggttcaacagcgtagttatttagaaaatgtaatcagcaatgccgactatgttttcctaaagaacaaactgaaaaaggaagaaaatcaagaatggtatttcgttgttcgctttctcgctgccacaggtgcacgagttagcgaacttattcagctgaaggtggaacacgtacaaataggatattttgacatttacaccaaaggtggtaaaattcgccgcatctatattccgaagactttacgtaaggaagccacagaatggtttggtaaaactaagcgtacaagcggttatcttttcctcaatcgctttggcgagcgcatcaccaccagaggaattgcgcaacaattaaaaaattatactattaaatacggattgaatgagaaagtggtttatcctcattcgttccgccatcgctttgccaagaattttttagagaagttcaatgacatttctttgcttgccgacctgatggggcatgaaagtatagaaactactcgtatttatttgcgacgtagcagtgccgaacagcaggagattgtcgataaggtcattacatggtaacactagttcttattactcataaggttacttgcgtagtcatacaaaacgtatatttttagataagagccaaatgcctccaaaattatgaaggcatttggtagtctatttttcattttctgtaacatataatactttgcgacctatcagaagtttaaaggatattaaagcaaacactagagtaagaaatatttaatcatatcctaatcatttccttttatcgttgtccattttttcaataaaagattgactttgttccttcaccgcccgatacatggaataatgcgcaaaagattcttccttatatttcagactactaactgaagcaacaacagcccacgtcaaaataattactacaatagccacaacatatcgaagtttaatatgatgcccacgtataaacatcccattgatattgggtggaataacggttattggatgtttcagctcattgatttttgaaagtatttcatcctgctgttttaatatattttctgtattaatctcaatattaaggcgattgagattgtaatcacaaacgtggctatatatgtattcaagaaacttagatttttgcttaaacagttcgaccagttttggaaaccattgtgaaaatggtaatgtatcaggttgttgtttccaaacatgtttcttcactactgacagtgcatcattccagcaagtacagaagcttttggcaactccattataaatggtcttttcatccaaatccacctttatatgttgctccggttggtttggagttacattctgcctattaacgcattccttcaattcattgatactttgacgcaaatttgcgagatttgcagctactacatcttctttcattatcttctacgttttgaggttttataaaaaggttcgtttctttggttatccttgcttttatcatcccgccatccctgttcgttattagttcctccgccagcactaggaacaattgcttgatgaggttgcactataagttctgttgccacattacccaatgttgcgcaaagacggttaaaacttagatctgaatcaagtttagaaccggcaatgctaaattcatccatacaaaaggatataccacgaatattatcagagttttctgcatgattaaaacgtacatctattcccttctctttgagcatatggaagaagtcatgccatgagcgagatgccgccaacgcatcaagagttgaggaacgaagattatacttacgtaattgatgaggacgtaaacggcttttatttctggctttgctgtttttaggagcaaagtaaagtttatactctttggttaaagcacgacagacttttgcatttcgtatcctttcgttgctgtcagaaatgagattaccgtcattgtctatccggttgaatacgatatggcaatgtggatgttccgtatcatgatgcctggttatgatatattgggtattgcgaatccccatttgctccatccatttcttggcaatctccaccataagtgtatttcctttttcgtcattgggaaaacggacggtatcttgcggagagaaagcaagagatacgtgtttcaccggactttttactttcggacgcatagaggtttgtatctgaaaagaatctgctatggttttgttgttgatagcacaaacaccttcatgtgccaaaagtgtagcactctttttcttgttcttttggtcattggcataatttactattcctctaaaatcggctcttgttttaatcttcgctatcatgattgttattttttacttgggtgataattctgctgacttctgatataatagaaaagcattgttgtttcactgcttccaaaccatagatgtgcatctgatgggcgatctgcttgacattattggctataccggaaaggtcacggattgccgacatcatttccggactgatgcgctgaccgacttcacagcccattgcagcctggtggcaaaattcattgacagacaatcctgcctgttgggctttggattgtatatagatatagtcgttctcggtaaacattacccggaaacatttcgtacgtttctggtaactcgccaactttgggcgaccaccaagtttcttttccttcatacttatataaactttgatgtgcataaattgattttttgagagtggcagttctatccgcttgccacataggttttagtgacactaaaacacaaacttgccactcaaaaaatcttcctatatttaccttgttctattcggcttagttttccatctttgataaaggcttctatccatttgtttgccgtacttccattttcacctaaagctaaaacagttgcgtcataatcttttttggtgaatgttcctggcaacatattataaagggtattccttcgtgcgtaaatgcccgtttcttgtgaaagggattgtaaacgtttgggctgatttcctgacaagtttcgatagatgaacactgcatggcaaagcaaggtttcacagatactcatggctatggaatagtcatacttatggcaaatcaattgtatagtcttgttagaggaagatgattcgtgagtcatattctccaaatgtcggacagcagtcaacaccatcattatacgataggcaatcagccccatccgtcggactacaccctgcatcttgttatctacttcgtcacaacattcctcattcacccgactgagatattctataaagtgttcctgcaaatcagagggaagagaaaaggaataattgccttgtctgacaaattcttcatgcagatggcagaatttatcccccatcagtttgaacatggcattcttggattgggaaatatcatttgtggcaaacacgtttcttatacctctattgaaacgaatgatataaaaacagaaacggctcatcagaccgttttccgcatcaggtatcaatttccttacctgttcgggagttccagccaaagcgactgacactcttggattgctgacttcgcaatattccctgtccttgcggcggtttaaactgactaactcatgatgaaatgcctttcgtaatacatctgaataattaccatagtccgacttcaaagtctggcttaatgtgtcaccttccgattcaaatagcagtccgattccgtcattatctcccaatatcttcaggaaagaacttgcgctactgttggcaggaatgacaagcattcgcataggcggttcagttggcatggtcattccaccatctttcttgcctttgatgtaagcgttcattgcttccttgtactccagctccaatcgttttgaaagttcatgcaaattgcgattgataggtgctacaagttcccggcataaagtcaatgcacctttccccataccggcatctgctactacaaacagataaaggttcggataaacgatgcgttcatcgtacactccacaaatattgtgaaagcagacagacaaacacacaatcgccccaatcaatattgtatcacggtcatccagcgatatagaattgttgacaacctcatttagaaaagggggaagatgctcaaatacacactcaggaaatgccggaagttcttcctctgactttatccatttacccgtttttccattttggatatttggcaaaatggataaatgttctttgttgaatggagccagcgaaattccggcttggtttgcaagatggaaaaaagaacgaatggtaataccttgtcctttggattgcagacaatgtgtatattgtttgtcggtttcttccctttgatagttagggtaaaacctgctaatgcggtgataatactctcgtccattttctcccaatccgtccacaagcgcaaagcccaattctacccaatctttataattgggtgttatatcaatggcacgctgctctatttcccggacaatattttccacatcttcctccaccttattatatagtggagtaatacttggcatatctgtttgctgtatttcagaagggacattctcccaatcttgggcgaaaaatattttctttgacatcatctttgtatttagggttaatatatgcttgtggatcatgtggcaaaaaacatgaacgagcaacgtcacttccggacatatctaccaatggcaagcctgttgctttgatacagttggtaacagccttaaagtaccgggaatgttcccagcctttcaagtcaacgggtattatccattttaatccattaccggatggactgacaaataacagttccgtatcaaaatactcatggttgagtaacttttgctttagttccataatattttccacatgatcaaaatccagacacatcaatccggagtgcattatcagttccctctcattccgtttacggaatagtccagaaaaagtacaatagtcaaaatgggtggctttgtaccttttggcttcaggagaagtagccatcagacgcaaggcttcggtttgtggttgtgcataatgcccagtgatatagcggtacacatccacaatacctacagctcttatcggttcgatgttctggatgggcttgcgaaagaatgaaaaacaataatcagccgttcccatcatctgataatctttttggattcaacaaatcgtctggcttcctccatcagttcatcctgtgtcttatgcgatttgttcttcaaccagtcatcaatttctgattgtagaaaagccagagccttatttattttatgtacggggatttgtttggctgaaacccatccataaaccgtttgcttggcaggatgcgatggtaggtaagcacagagctcatctatatccatccacttgggtgaattacttgcctgcttattctgcagggcatttactttagattgtagagcctctacggactcaatcaggtaggacaatgcatttggcatctcctccaacgaatttactttataagccatatctttcgtattttagagttaatgccgcaaaaatatatgtatgtttatgggtgctaaataggtgcttgaaagccaccaattacccactcattcaccaccgatagatttaattttcattaacataaaaggataataaaagagggagcaaactctttttatagtaaaatgctctctattgagagtgtctatgatgcaaaatacccctcaaaaagcaggggtttaatgaggggtaaattatgatgtgtttatgattctttgttataagtcattgatgctcaaaggtggaagtttccaccatgacctacaaagtcaaattttcgatgtgtaatgtattagctgctttttctttctgttcgttcacgatgagatcg

SEQ ID NO: 3753 - DNA, 51371 bp, Unknown
  gut microbiota DNA sequence
aagacagacattctgcctttgaatactttcgatttttacgcatgttactaaataaattgtgtcaacttatttagtacactacaacttgctgaaaggagaaaaaagagtgtctttatatcctatataaataaggtgatagggaaaagaatttaaagtgacaaaatgcaaacaaagaaatgtaacctactctttgcaaaattgggatatgacatctaaaaatagtgaaatttttccgtaattgccgaaaatcatcttttttcatcctatatttaccagtgtaaagattcgtttttcactgataactttcctatctttgcattgaagaaaaaacaaagactgactatacacttttatacataacttaaatacataagaattatggaatttgtaacaaacgaaaaacttaccattgttggtgctgccggtatgatcggttctaacatggctcagactgctatcatgatgggcttaactcctaacatctgcttgtacgacccgtacgctccaggtttggaaggtgttgctgaagaattgttccactgcggtttcgaaggtgtgaacatcactttcacttcagatatcaaagaagcgctgactggtgctaaatatatcgtaaactcaggtggtgctgctcgtaaagctggtatgactcgtgaagacctgttgaaaggtaacgcagctatcgcagaagaattcggtaagaacgtaaaacagtactgtccggatgtaaaacacatcgtagttatcttcaaccctgctgacatcacaggtttgattacactgttgtactctggtttgaaaccgggtcaggtaactactttggctgctcttgactctactcgtctgcgcagcgaattggctaaacacttcggcgtttctatggacgcagttgaaaactgccgtacttacggtggtcacggcgaacagatggctgtatttgcttctactgctaaagtaaacggtaaagctttgacagacatcatcggtactgacgctttgacaaaagaacagtgggctgaaatccagcagaaagtaactaagggtggtgctaacatcatcaacttgcgtggccgttcttcattccagagcccgtcatacgtttctatcgaaatgattggtgctgctatgggtggtaaagcattccgctggccggctggtacttacgtttctaacgaaaagtacgaccacatcatgatggcttgggaaacttctatcactgctgacggttgccactgcgctgctttgaacggtactgcagaagaacaagctgctttggataagagctacgaacacttgtgcgcactgcgtgacgaagtaatcgctatgggcgttcttcctccagtagctgaatggaacaagctgaacccgaacattaaataatcggattttccattaatataaaaggagactgaatcatcggtctcctttttttatgcccttccccaatgtcgttgtacatcatataaaattataaacatctcatttttacgtatttatactttcctaatgtacatctgaaaactttcagtcgctctcttaaaagcactacctttgccgctctctttaccatgtatttctaaaactacgggcagcaatgagaatatgcactttattatttttctttatttcagcactgacctgtcactcgctgtgtgcacatactcccgcgagcagttattttttgatgcaagactctacgtcttctctcacctcatcggctcttcctgcgaaacaaaagaaaacaaaggaacttttccagcaaaatttttcgtacatgggaattccttttatcgtttccggattaatcgtcaaaaaacaaaaccaggatttccgtacactgcgcaatcgcttccagccgacctttcaccacgaatatgacaattatacacaatatgtcccgttagttactacatggggcatgaaattagctggagtagaaagccgcagttcatggaaggaactcacagtcagcaatgttttctcagcagccttgatggccggctttgtcaacaccttgaaatatacgaccaaagaaatgcgtccggacaattcatcaaacaattcatttccttccggacatacagccaccgcttttatgtgcgccacaatcctgcataaagaatacggcatgctcagcccgtggtacagcatcggaggatataccttagcgggaataaccggtatcacacgccagctgaacaaccgtcactggattggcgatgtgctggtaggagctggaatcggcatgatttcaacggacttaggctatttcttttctgacctgatttttcacaagaatgctaccggaacgcggtcaacacaccatttcaaccgttacgatgcaccttcatttctgagcctcaacatgggatttgccacaggaccttctaccttgcgtactgccgaactatatgacacagaagaaggaactcctttgggcatgcgcctgcgtacgggtacatcgaccgtcgtcagcgcagaaggagcctactttttcaatgcgtacatcggtttgggagggcgcctgagagtagctaccgtacctgttatcgccgacattcccgaagagaacaaaaagcattttgacctggacaatgacttaaaggaaggagctcctgtcaacatgtacctgctcgacggactagaatcggaccatttaggcatgtgcgacatcgatttaggactttacttttcttatccgctcagcagccgcttcctgataggaagcaaactgttagccggacgacgcactaatgcaaactttaccttaaactctatttcacggattaatccagccattttcgaccgccagaaagtaagccaggaagcctacgaccaattctataaagccgacgtagattactatatccagcaggaaggcctcagcgttcaggaaatgctacagggtactttcattgatgaggaatttcttcacattcgtaaaagttctacattcaaattaggaaccggcctttctctcgcctatcgctacaaggaaaatgcggccctgcgtctctattgcgactatgactttgcctccccccgactgacatacgacctgaagaactcctgggcagacgaagacggtaaccgggaagtccgttcgtatagtaaaagaacgcctatgcataattttactttcggagcttccatcgcgttcatgttctaacatgaaagccgttgcacattctacttatttttattattttcgcccttcgaaatgattgaccaagctaccatagaccgaatactggatgctgcacaaatagtagatgtggtatctgagtttgtcaccctccgtcgccggggagtgaactacatcggactatgcccgttccacaatgaaaagaccccttctttcagtgtgtctcccagcaaaggattatgcaaatgtttcagttgcggtaagggaggaaatgtggtacacttcatcatggagcacgaacaactttcttactacgaggcactgaagtggctggctaacaaatatcacatcgaagtaaaggaacgggaactcaccgacgaagaaaaacaagcacatagtctgcgtgaaagcttgtttgtagtcaatcagtttgcatccgaatattttcaagacatactttataatcacatcgacggacagcgtatcggtatgacctacttacgcagccgaggattccgtgatgacattatcaaaaagttccagttaggatacagcacagacagtcacgatgcactggcacgtacagccaaacagaaaggctatcaagaagagtttctggtaaaaaccggcttgtgctatagaaaggacgacggttcacttcgcgaccgtttctgggggcgtgtcattttccccgtacataccttatcgggaaaagtagtagcttttggcggacgtgtattgagcgcagccaccaagaacgtgcagatgaagtatgtcaattctccggaatcggagatatatcacaaaagccgggaactctatggcatttattttgccaagcaggccattgtacgccaggaccgctgcttcttggttgaaggctataccgatgtcatttccatgcaccagagtggaattgaaaacgtggtggcttcttcgggtacggcattgacctccgaccagatacgactgattcatcgctttaccaataacatcacggtattgtatgacggtgacggagccggaatcaaggccagcatacgcggtattgacatgctgctggaagaaggcatgaacatcaaggtatgtctgctccccgatggagacgaccccgacagctttgcccgcaagcataatgccaccgactatcagacctacatcaatgagcacgaagtggacttcatccgtttcaagacgaacctgctgatggaagaagcaggaaaagacccgatcaaacgtgccagcctaatttccagtatcgtaaaaagtatctctgtgatacctgactcgattgtccgctccgtatatacacgcgaatgcagccagcttctgcaaatggaagagaaaatcctgatagaagcggtaaacaaactgatagagcaggcacaggaaaataaatacaaggaaatccagcggaagcaacgacaggctacccaggatgctcagcctgctcttccgactacttacccggagacacagccgacagagattcctataccggatgagactcaacttcctccagctcctctggaaacagcagcagagtatatacctccaaccgctgaacagcctgccggacaacccgcaagcactcctgttcctacggacaattacctttcgtatatcccattggaagggaatgaacagaaactgttctacaagaaggaacagctcctcctgcaaatgattgtccgctatggagagaaagtgatgtgttacttagaggatgaaaacggagaagagcaaccgctcactgtcatagaatgtatttcttccagcttgaaggaggatgaactgcagtttcactatcctttagaccgccgtatcctaaaagaagcggagaatcatctgcacgacgaaggctttgtgtctgagcgctatttcctgactcatcctgatccggaaatcagtaaacaggccgcagaactggccagcgaccgctatcagctaagcaagtaccactccaaaggacaggcaatcatcaccgatgaagaaagactttatgagttagttcccaggttgttaattgatttcaagctatcgattgtagaagaagaaatgaagcataccctgcaggctttagccaatccggacatctataacaatccggagaaatgtcaggaaatcatgcaacattacaaagagttgcaaaaaattcagattccaatggcacaaaaagcaggcgaccgcgtcattttacgttagctatttcccctctccacttacgataaaaggggaaatagtctctttcatattaatattttgcacgaatcaggttcatgaactcttcgcgcgtcttggcctgattgaatgcgcctgtaaagtcagaggtagtcgttacagaattctgcttttccacgcctctcatctgcatacacatgtgtttggcttctactaccaccattacgcctaatggattcagtgtttcttggatacactcctttatttgaagcgtcatgcgttcctgcacctgcaaacggtgagaaaaaatatctaccacacgagcaatcttactcagccccgtaatgtatccgttaggaatatatgccacatgggcctttccgtagaacggcagcatgtgatgctcgcacatggaaaagaaatcaatgtccttcacaatcaccatctggctgtaaggttccttgaattttgcggcattcagcacttctctcggatccatttcatatccgcgagtcagcgtcagcatggcttttgctacacgctcaggggttttcaacagtccttctctttcaggatcttcacccagcaaagaaaggatttccttgtaatgcccgaccagtttctcaaccttctcttgcggccagtttatcgaatttgtatctgtcatcattattctataggtatattaatctgttcacgcacaatagacacttccttaaaaactcctgtagctttcaatttacgcatggttacatgtgcttcttcaatacttttaaagtctcctacccggcacagccagcgaggaggctgaaaataagtataaaccggaagttccggaaattcttctttcactttcgttgctaccctattcgcttcactacgcgcctgacgggaattattcccagcgtatacctgtacgcgaaatccacgagcttttaatgtctttaccggctccgaactggtagaacgcacataacgtttccctatcaaagaggtaatctgtgcatcctggtggatagtcactacaccttctcccgcccgacgggtctgcaggctttcgataatgttctgctgggcataagccccgccgacacacaaaacagaaactacaaataaaagatatttcagcataagcggatttttagatagacatagaaaacaaaagtcaattgagcacagagaccatacgacggtgctacgtcctcacatcatctctgtgctcataagtcgctcctgactaattcaaaaaagaattatttaaaagcgtcgatgatacccttgaagtctgcaactttcaaagcagcaccaccaatcagaccaccgtctacatcaggattagcgaacaattcttttgcgttagaaggcttgcagcttccaccgtacaggatagaagtattttcagctacttcctgaccgtatttagcagcaaccaaagaacggatgtgagcgtggatttcctgagcctgttccggagtagcagtcttacctgtaccgatagcccaaaccggttcgtaagccaagattactttaccgaaatcttcagcagacaaagagaatacagaagccagctgagcttctactacttcattctgtttgttagcttcacgttcttccaatacttcaccgatacagaagataggtttcaagttgttagccaaagccagtttaactttttcttccaggatttcaactgtttcgtgatagtaagcacgacgttcagagtgacccaagattacatactgagcacctgtagatgcaaccatttctgcagaaacttcacctgtataagcaccagagactttgtcagcgcagttttcagcacctacaccaatgatagagctgtccaccagaggagttacagaagccaagtgaatgaaaggagtacagatgattacatcgcagtttggtttgtctgctgtcaatgcttcgttcaattcttttgccaatgcaataccttcctgcaggttcttgttcattttccagttacctgctacaatgttttttctcattttgtttaaattttaaagggttagttataatgtttctttattattctcttcctcttttttctttttgcggctttttatgcgcaaccatatcaggtcgactacggtcaggaacagcaaaggccccaggaaccaaccggtcacttctaccaccttgtgcacattggttttcggattccatgtactgaatggaagtttctccagcggtgcattcaactggtattcatctggtagattggaaacactccatttacgcagcacgactccttttttcagcagcatcaatcccggattggaacgaatcatcgttttcagcgtaatctcatccatcaacgcaaacggatattccgctcctgtattctcttgccagtctatgatatcctgctccgaagaagctgtcagacataggaaacgatacccgtgctccacgctgtaatcatacacctcattgatcaaatccatgccactatcgtctgcctgcttcaaccatggtgccaccagtaagaacgtgtactggtcgctatgaagtatgtcatcggtcaaatcctctcccgtttccagtgaagtaatcgagaagtcgtgaataggaggttcatagcccttctccttcacccgcgtcttcgaatcgacaaaggtccacgtggaatctgtcgggaaattatcaatcgtaaattcctgttctttaccgtctttcgaataaataaaaatcgtttcatactcggtaggcttctcaccttcaggaattgtcatgccttttatgatgtctgctcctacatgataaggacgaaaatcgaacacaggcaggtagcgcaggcagaacaacatgaagaagatgatgaacagaatactgtaaagcgaaatcagccagtccactttcgtggtgaccagattaaagatatgccgacgccacttaaacacggaaatagccgcaataagcaacacgatgttcttgaagaaagtctcccagttggtcagcacaaccgcatcaccaaaacatccacaatcggaaatcggattggctatggtcagccacaatgtcaacggtgtcataaacgccatcatcaacaaagccagcaaaggagctaccctccgacgaataccgaagaacagataaatgccaagaataaactcaaacaaggcacagagcatagctgctagataaggcacatatcctgcgctcaggctctgcagcccccatgcttccaggtaatcctgtaccttatagaccgtgcccaaagggtcattagcctttacaaatccagagaacagaaaaacgacagccaataaaaaacggcagacgttactccagatcacaaatgctttatgtagaaacttattctccaaattccagcttaatcaatccgaaaacggcataattaatcatatccatataattggcgtctacaccttctgaaaccaaggtgtctcctttcaaagattcgatttgcttggtccgataaatcttcatcaaaatcaaatctgtataggaagtgatgcgcatgctacgccaagcctcatcatagtcatgattcttcgccagcatcagcttcagcgccttgtcggcataggtatcatataattccagcgcacgctcttcagttatatcttccttctcggcatagcccagttccagctgaataagcccgataataccataattgacaattgcaataaactccggacgaatgccttcatctatcaaggacacgccctttacttctatgctgcgaatacggtttgccttaatataaatctggtctgtcacggaagacggacgcatgatgcgccaggcagctccgtaatcatgcaacttcttagcaaacaaatcacggcatactgcaattacatgttcaaattgtttcttggtttcttccatcttttatgctcgaatatgtggcaaagttactgttttttcagagagcacacaaaaataacggagataaaaatgccatttcatacagtcccgacagaactatatgaaatggcatctccttttatttcaataaatttgttttccagattaagaacatctcaagacttgtccgatacgcaacgttgtagtacgttttataccattaatctgacacaagcggtcgatggatacgtgatacaaacgagagatacgtcccaatgtatcacccttacggattttatgatagcggatagctgatttttccgcctctgccgcaccggattttcctgattttacagcagccaatgcacgagtacgctgatatgcataacggttggcaccacgcacaaacaaatagctgtctgaaacgatatcctggttcgggaaatcaaacataaattctggatttatcacctcacctaagaaacgagtttcaaaatgaaggtgagaaccggtagaacgtccggtatttcctcccaaaccaatcgggtcacccgcctttacatattcatcttcagctacaatctgcttagacaagtgtccgtaaatggtttccaaaccattgtcatgacgaattactacatatttgccataacctctacgttcatatttcaccatgcgcacacgcccgtcgaaagcagcacggatggtatcgccgatatagaccttaatgtccaatccgttgtgcatacgccgccagcgcggaccacatttagaagtaatttttgtatgagttgtcggcatgcagaagcctgtcagatcgattcggaaactatctggaacctgtacattaccaccgtaagcatgaacgcgatcattgttccagtttggataaagactgtaagcgggatatactgcctgttctgctttaatctggcgaatcagggctaatgaatccactgcttttaattttctgtcaatcggcgcctgacgagccagaagatcctgtcctgaaacattgatactgaccatggccagagccgccattgctactgttctaatacactttaaaatcattataccttatatttttcagctagtatccgtcggatggcctttttccagcccgacccttattcagaataccattactggtttaaaacaaatcactttcagagtgcacttctgccttcatttcatgcagatatgcttgactgctttacaaatagcgttccaaagataaaaaaaattcggtatatccggctgagggattaacgatttttcatgtatttttatacgcaaaacatagaataaatgttttacaacataacattcagcaatacaaagaattaaataaaatcactttaacgaaggattcaaatcttccagagccacaaattttccctctttccactccagacaaacgggctgcgatttcaaataaggctttaaatcttttgcggtttccttgtccagatagtcgggcgtagtataagtgaacttgagcaccggtttgtcagacgacaattcagccttccacaagtacatgtcagcataggcacgaaggttcttcaaggagtcagcctgggctgtcgaaaccggagtcaaataaaattcatcttcttgtggaagctgtaaaaaatcggaaagcggcaattcatgccagttcgtatcataaaaagtaatctgactgtcagcagcccgagccgaataggttgaaacggcacaaatcactttcacggagtcattcagcggaagcagcttcagttccaaggtgctggccgaagtcgttttcaggaacaaataatctgaagtcagtttagtcatttccgacatattcccaaaacggttcttcacctctgccttcatcccactttccagaaaatcaccgaagtcggcccggtttacctccgtcaaaagcggtgacaaggaatctggcaatgccacaaaaagcgttttcaaatcctgcgcacgccctgcagcaccacatacatacaacacgaatatcaatatcaaaatacgtttcataaccagctattcaaaaaagtgcccaaatatacaactatttctgttagtaagaaaaaatctctctcccttctcaatttttcccatcccgccttttcaggaattcactggggctttctccaaaatagtctttataacaccgggtgaagtaagacggagaactgaatcccacttcgtaggtgatttcggccaccgtcttttcagaggatgccagcaaagaggcggcctttttcaaccgggcaatgcgtaacaattcattcggagcatatccggtcaaggatttcgttttacgatatagctgcacgcgccccaatcccaattcagcacccaaatcttctacactcaaatctgaattgctcattttttcctcaatcaaggccttcagcttttccacaaatcccttgtccacttcgcccaacgactgttttccgcttaccgccgtggcatcttctgtaaacgatttcaaccgtttccggttatctatcaggttgcggattcgtgccagcaggagtttggcattgaaaggctttgtcagatacgagtctgcgcccgaatcatacccctgaatccgctgttcatccatagcgtatgcggtcagcatcagtaccggaatatgagacgtctgcaactcgcttttcaaacgtttacagcattctataccatccattacaggcatcatgacatcgcacaccactacgtctggcacatacttcatggcctgtcttataccttcctgtccgtttaccgcttcaatcacggtatatttatcttgcagcaacatcttcacgtagtcacgcacatcctgattgtcgtcaatgaccagcaccacttccttgtctgccgttccatccacttccacgttttcaacccactgatgcaaggtttcttgtccggcatccagcacagccccttcctgcaggtttttcaaggattcatttttctctatcacctccttcacctctccttcctgcttcataggaagtacaacccggaaacatgtgccttttcctttctcgctctctacccgcactgtccccttatgcaactgcacaaaagcctctaccagagccagtcccagtccggaacctgtatgctgtgcatctatctgataaaaacgttcaaacacgtgatgtatatgttcttcggacatgccaatacctgtatcgctgacttccatacacaagcatggttggccatctttctctatccgcgaaagcaccacctttatctcccctttttccggagtaaatttaaaggcattggacaataagttgtaggtaatgcgctctatcttttccgcatcggccaccatcacatactgcgccacatctccttccgccttcacttcaaactgaatatgtttccggaacgccaaagtatggaatgcctctgtccaatcctttatacattccagcgcattaaattcagaaagccgcaaagccagtttgccatgttcatatttctggaaatccagaatctgagtaatcaatctcaataagactgcgacgtttttccgcacaatctccagcatattccgctccctctcacctaaatgcttttcctccagcaactggttgatagggtctgcaatcaaagtcaacggtgtacggaaatcatgcgacacactggtaaagaaggccagcttggcatgtgtagcctcttccaactgacgcgacaatgcaatcagctggtcacgctgttcctgcaactggtcacgctgctgttccaattgctgcttctgggtagacaattccgtattcatccggttctttacccaaaaggcacgtaccaggaaaaagaacaagaatccggccagaatcaatattaccacacaggcatataagaacattgtttgtgcggagtaacgaaggaaataatcatccaactgatgatttaaaagctcaattttctggtccagcgtcagaatatgcttcatctgcatctgcatcacacgggcattggcacgatttaccaacgcggtagaaagtatattttctcgttgatagggttcgccacgtagtatagccatggctacctgaatcaccttatcacctcctgtaggataaatgaaggtagcatccagtttgccttccgccacactttccactccgccggctaccgcatcaactcccacaaatgcaatctgtccggcacgattcttctggcgtgccttctcatacgccccgatagccatccggtcgttctgtgcaaagaccaggtttacttgtgggtgagcatccagtaacgtatccatcacctccccagccttctgccggaaccatccggcttctgcagatgccaccacctgcacccccggaacggccttcagggcttccatcatcccccgatgacgctccacggctggagtagaacctctcagtccggtaatctctattacccgtccctttcctcctaaacggtctgctatatattcacctgccttacggccaatttcataattgtcagcacctacataggcggtatattttttagaattgattttccggtcgaccaggatgacaggaattcctgcatcgtatgccttctcaatcaccggcgtaatagcttcggcttcattaggggctacaatcagcaaatcgacttttctttcaatcaaagattctatatccttaatctgatgggtattatcatcatgagcctgataaacctccacatttacccccggataaaacagagcttcccgaagaatctctttgttcatctgggcacgccaatcatcttcactacattgtgatacggctatcgtatagtccgcctcctttcgggagcaagctacagacaacagcagcaagcaaatcacacctatccaaccacagactaaatgtttcataattttatatctatttctgcaaatgtatgaaaatcgcagcgatttatacagtctgacagatacaaaaatcacgaaaccgacccacaatttttcgttcaacggctctactctttttatgtctcccgaagcggaaccatacgttttccgggtgagaaacctacgttttcgcttcgggaaacgtatggttttcacacggaaaacataaaacatacaaagccgaagcgtcattatcttcagcaggctttccaatcttatcagacaaaaaaatctccggaagtacagaaacatacttccggagatttttcacaaaataaactatatagcttaaattttttccttcaaatacagagggaattccggcatagccccattctgggtacatacaaatgccgaagcctctacagccagttcatgcgcttcgcgtacggtctttcctttcaagatagaagccacgaaagtagcagtgaatgaatcacctgcacctaccgtatcggctacatttaccttcggagtctctacaaatgacacatggcccggagtaaagacatagcttccgttcacgccacaagtcagaatcaacattttcaggttatacttggcaagcagaatccagcatttatcctgcaggtcaatacccggataaccgaacatacggcttacagtaaccagttcttcatcgtttatcttcagcacattacatttctggaaagaattgcaaagcacttctttcgtataaaagccctgacgaaggtttatgtcaaacactttcaatgtatcttccggcatggcatccaagaacttgttgattgtttctctggaaaccacgcttcgctgtgccaaagaaccaaagcaaaccgctgtagtctgtttagccaatccttccaaagccggagtgtaaggaatattatcccatgccacaccttcctttatatcgtaacaaggaaccccttctgcatccagttctacctgaaccgtacctgtgggatacggtactttttcaatcatgctatgcagattcttctcatagaagttttccaggatttctgctcctaatttgtcatctcctacggcactaactgcacggccgtccagaccaaactgtgatacgtgatatgcaaagttagccggagctccaccaattttctttccttcaggcagcacgtcccacagtgcttcacctatacctacaactattgtattctccatagtcttaatgtttaatttttaacgtataagcaagtaaataaatcacaccagctgtcatcactgctacagcaccattctgtccgattgcatcgctggccactcccatcagaagaggaaatacggtaccgccaaacaagcccataatcatcagtccagacacttcgttcttcttgtcgggcatagccagaagagcctgagagaagatgatagagaacacattggagttaccaaaaccaatcagcgcaatacaaatataaatcaccgtctgcgaatcgaaagcaaaaagtccgatcatggccagcatcatacagatggcacttatcaggaaaaagattctggacgatacagcccgcaagataaatgcgccagagaagcagcccaacgtacggaatataaagtagagactggtggcaaacccggcttcggtcaatgtcattccaatacgctccatcagaatcttaggagctgtagtattggtacccacatcaattcccacatgacacatgatgccaaggaaagacaacagaataaagggttttcctaacagtttcaggcaatcggcaaatccagatgccttgtccggctgttcttcggtaataggagtagccgaaagcaacagaatggcaaacacagctacaaccatataaatagggaacaacactctccatcccaagccaaacgtcggaatggcctgtaaagccccccacatagccagataaggagcaaggaaagaagcaatggctttcacaaactggccgaaggtcagtgtactagccaggcggtcgcccgaaataatattgctcagcaacggattaagtgaagtctgcatcaaggcgttacctattcccaataaagagaaggagcaaagcatcaatccatagctgtcaccaaacatcggaagcaacaaagagaagaaagtgactcccagactcagcaacactgtcttttttcttccaatccggttcatcagcattcctgtcggtactgagaatatcaagaaccaaaagaataccaaggaaggaaaaatatttgcctcagagtctgtcagacctaaatcttcctttacatagtttgaagcaattcctaccaagtcaacgaatcccatggcaaagaagcaaagcatcacaggaaacagcttggcatattttaattgagtatttgtcatttttacttgtttttaatctgttcaaattcagccttctgttttattcggctgtaagttcaatcacacgactctgagtaggacggaagccaaagacatccagaccgactttcatcaaataatcaccagagaataattctccatcggcctccagcgtagattctgttcccggcatcaggttgatttctttcacacggtacatcttgttcggatccaatcctttcactttcaaaggaaacagtttctcctggaaacgaggatagatgtcgtatgcaaataccacgcctttcgaagcatcctggttgacatagtttactgccatgtggttagattcatacggagataccagacgatactgtaccccatccagaatcaccggctgcagacgtttccagttggctaccgcaagctggcaatattccaattcttctgcagccatttctttcaagccgatatcaaatcccagcttacacatggatgccatgtcggtacgaaacttgatagaagtattcttattccagcttgtcacgtgtgcacacatggccttggccgggaagaactgagaaaagccccactggatataagctctttccaccggatccgtgttgtcactgcaccagaattccgtgaaatatttcaacgcttcatagtcacaacgtgcgccaccaccagagcaaagcatcatcggtacatccggatagttctcttttacccgtttcatgacattgtacacgccacgtacatgatctatatacaagcgtccctgtgcatctttcagataagaagaatagatattggtaatcgggctgttgcaatcccatttgaaataagcgatacccggattttccttcaacaacttatccacaatgcaatacacataatcctgcaccttcgggttactcaaatcgagtaccagctggttacgatagtaataggtttcacggttcgggtaatggattgcccagtcaggatacttttcaaacaattcactcttcggattcaccatttccggttcaatccagagaccgaacttcactccttctttttcagccgcctgaaccagcgcattgattccatcaggaagtttgtcggccgttacatcccagtcgcccagtccggctgtatcgctgctgcgtttgtatttgttgccaaaccatccgtcatctagcaagaacatgtctacaccgagttctttcgtttccttaatcagatcgacaagaatattctgattaaagccgaatcctgtattctcccagttattcaacaacgtcagacgagaaccttttccatctttcaactgataattccgtgcccagttctgaaggcgacggctaccttcgcccgtacccttattactcaaagtaaaaataaattcaggagtagtgaacacttcgcccttctgaagctcatacaccgaagcataaggattaatagcaggaatcacacgcagattacccacattgtccacttcgaaagtaaagctgaagttacctgtccatcccaatgtacccatcaggacctccccctgattttctgcagcaggagtatccagaccgaccatgaaaaaaggttgtgcatgcatggcagcacgacttcccagcttggtatctaccactttcttaccgaactccagcttctgtgtactcatctgtacttccttcgcccagtcaccactgaattcagtcaaatagtaagctggacgattgaaatacaacatcgtagaagcgtaacggaataactgtacaggctttttctcctgatgtgagatttcactccaagtcttgattacgtcctccttttcgtaagccacgtaatgcaaagttacgttcaccggatatttatcatcacgcaaatgaatatctgtctgtgttcctccttccacagcttttgtagaagaagacacgtaataaagccaggtagaagcgttaccgtcggcatgagtcacccccaaagccggttcaaagaaatcctcgttacctgaacctgagcagacttcccatccgcgtggagagacactggcatctgatgcaggatgtatctgccagtccagtttcttcaaatccgattcatgcaacagtttttcgcccaagtaagtctgatagagccgtccgttttcagccacctgaagcaccagatccgtattatccgttgaaatccggataatcttttcttctgcagcttccgcacactgccccccccaaaacaagcctaaagccgtaataaaaaagtttttcatggtcagtctggtttttaataattacaaccccaatttatgtatcttcatattctcaaccttataatcgccaccttcactatacagacggatagagttataaggtttggtagggaataccaagtttgtcatggcaatgcgacctccattggcaaagatttctacagaacatttgtctacaaaaatctgcaaatgataagtttttccttcacacaatgaaagaggagcccatgtgcctaatgcaaaatcattcttatagttgatagaagtcgttttacgacgatcatgattttcgatggcatgaggttctgctttctcaccaaaggcaaccaacccactttctgtacggtccatcaccagcttaccggctttcatatccaggtaaatcttggtcttttcacccttgtcattcagcagttccattccagctacagcagatgcacccggagttacatccatttcaatttcgaaagcaccctcattctgcgggaagatttcgtcaatcttgctttcacctttcaccgtctgattgtcaatggtacgtgtttctttacgcaagcctgctgtttcctttactgcattggctgccatgtaaatctgaccatcttttgtgtacaatgacagttcacgcggcaaggcatttgccccacgatactgacggataggagtaacatttgcatattgccagttgctcatccaaggtactgcaaccacgcggtctccagtatttgagaaacaaacagtagcatagtggtctttaccaaaatccaaccatttagttacttccggtttcgtgtcacatttgaattcttttccatcaaaatcacctacgaaatattctgtagcactaccaccgaacatacaacccgggttgatatttacaatcatcacccatttcatattgttcttgtcaccatcaaccggcaactggataaagtcaggacattcaaactgattaggctgtacaccataacctttaccaaatccgctctgatattcccagtccttcaagttagaagaagagtagaaacgcatttccttgtccgcagaaacaatcatataccacttctgagctggttcataccagaacactttcggatcgcggaaatctttcagtccgtcaaacggggtcaaaatcggatttttctcgtattttgtataagtacgtccattgtctttgctataagccatacactgaatctgtccgtgttcatcgctggcagatgtatagaaagcgataatggcatcttttccgtagcctgcgctattgttcttgtctaccactgtacttcctgagaaaatgtgacccaatgtgtcacgtgcgatagcaggattcaaatggtcccaatgaatcaagtccttactaactgaatgtccccagtgcatatttccccacttggaaccgtaaggattatactggaaatacaaatgatactctccatctttatacaccagtccgttggcatcgttcatccagccataaagcggtgtgtggtgatataccggacgataatagtccgtatttgccgtattaaaagtatccgacaactgaatatgctcccagcatacagcgtttgcagccacctttccaatggtaacagtagcttccttagctccttgaggcaattcaaagggtacgtaatactctacgctgtctactgccagacgtacatccatcggcatatcagccgggcttccggttactaatttcacctttccctcattagatgattcctggataggaagcaaaagatatttagaaggattctttatgtgtacgacagtcaaagtgtctccctgatgctcaaatactaagttatttttttgtgattggcatgcccacataccagtcaagaaaaacgctcctaatgcgaggttaacaaaattctttttcatgatacgttgttttatgggattaaaaatacaaattattcttttaaaaatacctattgaaaactttttataaccggcacaactcatggattcgttgtgccgggaatttatcggaatagaaaaatgaatgtcagaatttaagctgtgcagagaattctactgtgaacggacggatgtagcttcctgccattactgtattggcatattttccagcttcttccttcgttacaagttctgcacctgcgatacttccttttgcaccagtctggttcaggaagttaacaactgaacagcctaatgacagcttcttgtttacctgccagttcaaaccaccgaaggtttcccaacggccattgaaataataggcatcattgatattagcgtatgtcttgctaaagtaacggaagctggtccagattttcaaatcttttgtaatcatatagctcgggtcgatttccacgattacctgcgggatttctgctacgatgttaccagtagcattgatctgacctacataaccgtctgagaacttcacagaagtttcatatttcttgtaagtcggcttctggtaagtgaagaggaagtgtaaatcaaaacctttaaacggacgagctaccacgtcagtagtccaacccaatgtcttgatgtcatagttcaacggagcagccaagatttcgtttactccatttacgctatgctgcaagttcaatgtagagttgttgttggtctttgagatataagagaacaatgaagtcaagctcaaccattcgttgttatagtagataccggcacgtcccagaggtactgaaatcttatcggtattcggcaatacagccggagcaaagttctcaattctcggatgctgggtaatgtaagtaaagtctccagtaaatccgaactgtttagtcaacttataagtagcagctgcactcagtgcgtaattaaaccagtcatactccatcggagtcggttcaatctttgttccattaggtgttggtgcagtagctcccagataataatcagcaaaacgtcctacgaaattgccatctgcatctttaaccgctgcattgtttccacgaagagcctgatattccagacgagcaccgtagtaaaggttaaatttgtctgttacatcccagtcgtgagtgaaatatacagccaatttgttttcatgacctttataatattctgatgcattcttgttgaagtcatagtaatatccatttcctccatatacgcgagctgtcgatgtagcatagtccggattataaagacgaaccggatagcttccgtcagtcggtacagactggtcatacatcgtagtatttgatgcataatcaatatcataataccattcgttcaatcccaaacgccatgtaccgttagacaatttacgagacagctcagtagtaaacattacttcatcaatgaaaccacggttcaagcaagacatacggctctgtacatattcgccatcgtatgctctcatgctaccgtcttctgcttcatactgataattgatagcgctgtttgcacgctgtgaaagttccatcggagtctggtacacacaagaaccagtcgcatggtcgtatttcataattactttccaagacaaaccgttatcccagttgtaattgttcatcaaggtaaactcactacccttattctgtacggcatcatacaagtttgttctcttcaactctcccgtacgcatgtcacgatataccatttcattgtcaaccggaagataagaagtcgtacccaaagcaaaagcacctaactctcttacgctaccatcgcctacgtagataaacggagccgactgagtggcatacatatataccggatggctgttgctgtaatgatacatagccgtaaactcaccccggttattgttatagcgttttgtcaaagcaaacttataaatctgtgtacgatcctggaaaggagtagatttgattttgaatgttcccgggtcaaaatcctgatagatgcttccactatagaaccaatcgttagcaatttctccgttaagattcagagagaactcctgcatgccgaaatgattggacttataattcaatgttccatgaaaacctttttcaccaagctgagtgaaagaattgactgcatatccgatattaccggttgtaatagcagtctctgaaattttcaacaatcctacatgattcaagctggcatctgcacgccacaaagagtttacgctgtgcggattggtagcatacgttaccggaattccattttcaagcacgttcacatccgcagaaggaagaccaatctgaatttcacgaggtccgtttgcgctggcagcattcaacatgacattacggttaccttcttctttagaactaccgtcatttgatgatttgttttcttgtgcataaccatttacacaagccaaggcgagcagcaataccgcagctcccatacgatttgaaaactgttttttttcggccttcatagcattattaaaattagtatgttagcatgaaattttttatttgttcgtcgcaaaagtaagtgattgccagctacaaggccataacgaatgttgcatcctatgacaatattgtttcatgcaacaatattactacaggacgcaacatttttactagcaaggaggacagttactgcaatttatacacattcaatgatttcactgcatacccgttcttgtccgcttcaaagcacatttttacataaggctgtgaagggaagaccaaatttgtcatcacaaattttccatcctcaccaaaagcttcaatacttgaccgatcgacaaacaagcgtaaagtcaactctttgtcaacattcaccggagcgaccgtaactgcaggaaagtccttgctaaaatcaacctttccgctctcactacgatccatcacaaattgtttacgattcaagtcataatacatagagactttctctcctttatcattcaacaagctaaaagcaatctttgacgcacctgcattctgaatgactatttctacttcataggctccttgcttttcttcgaacaaatttaccatttcatgcttttcggaaaccttaaatgaaggtattgaaactttctttccacgtgcttttttcacttccactgaaggagtgctttttaaatacaactcctgtccttcgcgataaagcgttaaatcacgagctagagtattggcactacgatactgacgggtaggaacattattggcatactgccagttactcatccatcccaatgcgatacaacgtccgtcaggtgcattgttccatgttacagtagcataattatcttttccccagtccatccactttgtctgagtaggtgactcgttcacaaacttcttgccatcaaatgaacctacgaaatactgagcggcactacctccaaaaggaccaccaggattcaggttacatattagtacccattttttctcgcgagtaccctctacaggaatttccaccaaatccggacattcccatacgccaccatgagccccctgcatagcaccaaattcactttctttcttccattccttcaagttaacagaagaatagatttccatgtgctggcctactgcaagaatcataacccagtgctttcccggtgcataccaaaatacctttgggtcacgaaaatccttttcagaagaagtcaggatagggttgccttcatatttcgtaaaagtttttccgttatccaggctataggccatactctgcatctgtatatctccccatggagtagatttagcagaagtatagaatgccaccacagcttctttaccaaagcctgccgtattttcatggtccaccacacaggaaccgctaaaaatggccccccatgcatccggtacgatggcacacccttcaaacttccaatgcatcaaatcagtactggtagaatgtccccaatgcatatttccccaaacagacccatacggattatactggaaatacaaatgatataccccatctttataaaacattccgttcggatcgttcatccacccgtatgccggagtatgatgataaacgggacgaaaactctctttgttcgccatatcaaatgagcccgacagtttcaactctttccagcaaagagccgtttcaggaaccccttgtatttctattgaaatatgctgccctttataagccgacaacgcaaacggaacgtatgaatccactctctcgcgagccaaacggacattcataagagtacccttctgctcgttatcttttacaacacaaattttaccttccggtgcatcatcttgtatgggaagaagcaaataatcttcggtaacatccaaagaaacaatattctgttcacacaccaaatgacgaattgtccatgaagaatcagcctgtaccactgatgtcattcctaaaaaaagtcccaacagggttacttttattgtatatgcatactttctcataaaattatatttttaatatatatcgctatgttatttcctttttcttccttgttgacataaggaagaaaaaggaaaatctatcttattattcatatcccttattctgagtgtacaacccaggaatgtaatacatctggttataaggtatcgggaagaactcattcttacccgcagtaaaatgagcatccttataatattgtccataagtctgtccttcgtaaacgtcattctgctcggtcaggaaataagcattcaatgttttcgatgcaattccccaacggcgcaaatcaaagaaacgcccattctccattgccatttccaaacgacgttcccaacgcaaacatttacgtgccacttccttagatgtaaaataattatcaggatactgggctatctcacactgatcttttgcataactaatgtgtttgttgaccgataaagcagcacgcccacgaatgtcgtttataatcttctcagcctcatccaatctgttcagttcaatcaaagcttctgcacgcatcaacatcacatctgtataacgcaatacataatcattcattgcgaaagcctgccatgaaccgttataggtttccccttcagaacgttgaggaacttccttcaacgaagtatagtatccatacgtattaggagtacgtgagttatctgtggtcatcgtatattcagcctcatatttataggggaaagtcggcatacctacagtatggaacaaacgtgggtcccacttttgattgtcaggttgtccattaatcggatagtcaatctggtcattgtaatcatcaaacatcggcagcccatttcgtgtcttaaaggcattgaccagattttgagaaggcttgtggaagtcccaaccacaagaccacatcttccaacaaccattcaatgtattcgaccagttagcacgtccataggttgtattatcatcttcataatcagaacactgaactgcaaaaattgattccttactatttttataagcaggcaagaagatatcgccataatcttccaggtatccgtaatcagaagctaccacatcatctgtataagttatgactttctgcatgtattcagaattgatatgactttcaccggttgttgcttcatatccgtctccccatgccaaagtcagataacatttagccagataggctgcagccgctatcttattagcccggccgtcctcacccggttcttttacaggtaacacatcataagccgccttgaaatcatcgattactttctgaaacaattgttcgtaagtcaatgctgtattgctgacctgctcatgagagttgtcctctaccacttgctcgtcaatccaaggaacctgacggaacacggtcagaagtttaaaatagaaatgtccacgtaaaaaacgtacttcagcaattcgctgatcttttacatcttttcccaaaccatctccattccgttccaacgaaatcaatgcacggttacaacgagaaacagcagcatacaaacgataccaaagttcatccatttcaccaggcgtcgtagcggtcaatgtagtccaaatatcaaaagcatgatagcctgtatctgtcgtacccgaaccacccttcagacaatcatcagaacttacatcaccataggggaacaggttaaacggataagtataccagcaatctcccaacatggcataagccgaatttaccattttctccggttcggaaaatgcctgttcttcatccaccactgcagtcggagtatagtctaaaaagtcttcacaacttgtcaatgacaaacctaatgcacaagctgccagaaatatatattttttcatcatatccattattttaaatttaaaaaccaatttgtaaaccaaatgaaacagaagtagcaagcggataattccagttcggattttccggatcaggacaagtcaagctcttactcttgatagtcagcagattttgacctgacaagtaaattcgggcactgctcatcttaaacttcgacaagaaagaagcaggaaccgtatatcccacctgaagattacgtaatttcaaataagatccgttttctacataatagctggaagctctaccctcgtctgccgtattattggtagtcagagccggtatagtagaaccggtgttattggtgttccaagctcccaacaaacgagatcctttattagaacctgcatcggtaatactccagaaatcagtttgcgccttttggttattgtatacatcctgatcgtataccccctgccagaacatgctcaaatcaaagttcttatagttcaatgcaatattcaatccataagagaaagccggaaccggattataaatccaatcctgatcatcagaagtaatgatgccatttccatccaaatccgcatatttcaaaccgcccacacgagcatttgcctgtccggaagcatctacttcagcctggttctggaaaataccttctactacatatcctacagaagaaccataaggcatgccagactctaccagattttctttagacgtatgtgcgtatgaacccgtagtggtagccggcagataagtcactttatttcggaagaagtctacattagcattgatatccaagcctaagccacaggccagcgacttccgataccctaaactgaattccataccccagttccgcaaagaaggtccattcagccaagacgcaccaccttcaccgatagctcctaaataagctgggttaatcaacatgtcatctacatccttaatatacccatcaatagttccatacaaactgttgttcaggaatgcaaagtctgtacctatattatattgtgtagccgattcccatttcaaatccggattggcaagctgggtagcacgataccctgaagggaaagtacctgaaccctgaagatacaagtcatacgcagtagaagtcacacgatccaacccataatctacaacaaacaatccaaactgtgcattattatcaatagcctggttaccggtctgtccccaagacaatcgaaccttccaatcatccagccagtttgctttcaagaatttagacaaacgtacacccaatgtagcagctgggaaagtaccccaacgatttccttttccaaaacgagaagaaccatcttgacggattgtaaatgaagccaaaataaagtcatcatagttgtaatctacttttccgaagaaagaagctaatctatacccgaccttagcacctgtattcttcatcacaccggtagcggcattaggccacatataatctacatcctccaacgcatagccttctgaataagcagaaaaatcaatagaactttgctttgacaattcagctcccaacaacacattgatatcgtgcctgctggctacagtaaaattataattgatggtatttgaccatgtccagttcacttcattcttatttgacaacgtagttttagcaatgtcattgtttacaatatcagaatgataggtatgagtcattgcattaataaatgaattatagaaatccaatccgaagttcgaacggaagacaaagcccttgaaaggtttgatatctacatatccatttccgaacaatctccagtagttcaatgcattgtctttattttgatactgttcacgcaaaggattctgacggtcactcatacctccgaccggaccagagaatgtagttccgtcttcttcatacaccggtacaataggagccatcttcaacgcattttccatcggcgcacagtctacctgactggtataagttaccgtaaagttttctccaaccgtaatgtatttattcacattgtatgatgaattcatacgggcagaaatgttttcaaaatccgtatatttcaaaataccattattctttttatatcccaatgagaacatggtagaatgtttatcattggcatgtgaaagagaaagatcataattctgagagaagcctactcttgatatttcatccatccagtcagtatccgagtaacgcatggttttcttactgttgatatatccgtcatacaaaccattgaccgtataatttacatattggctagtactcggattccagacagtaataggagttcccgacgcggcattcaaatttaatccgtagttgcttgcatacgaaaccggatccagtccatcatttaatgcggcctgtgccatggctgtagcatattctgatgaattacaaacatccatcaatgactgtgaagtatagaactgggcagtcagattggcagagaaatctactttcaccttatcagccttcttacctttcttcgtagtaatgataataacaccatttgaagctcgtgaaccatagatagatgcagaagccgcatctttcaatacctgcatactctcaatatcatttgtattcaatgagttaagagacatgttagtaggtactccatcaattacataaagtgggtcctgagaagagttaaaagaaccgataccacgaatacgtactgtagccgtaccactcggagaaccgtttcctgtaatcgtcatacctgccacttttccctgcaaagcacgcatgggatcagtatcagaagttgtctttagcgattctgtagataccacagccacagatccagtcaaatcagccttacgctgagtggtataacccgtcaccacaacttcctgcagcatttcagagtcctcttccagaataaccttcaaaactcctttggcttttaatgtttgagatttaaaacctacataagaaatggtaatttcagctccttgctttactgataaagagaatttaccatcaaaatcggtaatcgtaccgtttgtagtacctttttctagtacagtagccccaataatgggttcaccatccgacttggaaatcacagtcccctcaacctgcaaactttgtgcttgcaataccatacacaccatagtaaacaggagtgtaaaaaataatgctcttttgtcgcttttcatttacgcattaatttaagttcaacaccaattttatttcatacaccgttcaaaacggtatggcaaatgtatggtccagcaactaaaaggcatataaaaaatgtttcatcctcgaataattatgttgcatgtaacataattgttcaaagatgaaacattcgtacaacgacttgcttcaagcaagagaactatctttattgaaaggcttctttcctttttccgctggtcgcaatcagatatacacctaacaatatcaatggtacactcaaccattgtccgatgttcaacgtcatgcctacttcttcagctacctgcggattcttcataaattccaatccgaaacgggcaccgaaaaagattagcaaagaaacgcctgtagtcagtccgattcgttttcctaaatgaagcttgtgatacatgaaccacgatacgaccagtgccaccagacagtacagcatttcataaatctgggtaggatgacaagcctgtgccactccattctgattgcataattcctgccattcacgcgagcggacaaactcaaatccccatggtaaggtcgtgggataaccgaaaatctcggagttcatcaggttaccgaaacggatacacatacaaaccaccgctacggcaggtatcatacgatcgaacagccaccacacgctttttttcgtcactgtcttggaataccagattaaagccagtatcaaggcaaatacacctccgtgactggccagtccgcctttccagattttcaggatttctgccggatgtgctccataataatcccattcatagaacaggcagtgccccaaacgagctccaatcacactgctgacaatacaatatacaaacagtttgtcggcccagttttctggatacccttccttcttaaacaaacgggagaccatttcgtaagccagaataaatcccagcccccacatcagcccgtaccaacggatttcgagcgaacccaaatgaaccagcaccggatccacatcccatacaatgctcgcaaatgtcatgctacttaattttttaatcaataaacttcacaaaggaacaaaaaaaatggattgcttcaaaacagaagaaacactctttgagggtgtattgccctttcacgcgaagaccagtcacaccgctcagtactccctaagcagtacttcagtacttccgtgggagtactccagtactgccgggaaagtactacagtactgccaaggaagtactggcaaacgataaaattctgatttaaagtcgctttaaagcaagtttgattactttttccacaggtgcatccggttcttccttgagaatctgcgcggtcaccttttgggaaggtgcctgtgcaaatcccaacatggtcaatgcagccactgcctcttcatatatttccgtattggcagctacagccaccgatttgacggttgccgcactctctatgcctgtcactgcaatcttgtctttcagctccacaatgatgcgctgggcagttttcaagccaatccccttcacggtcttcagcagcttgtcgtttccactgccaatcacgttacataattccgacggagaaagtgccgacaaaatcatacgtgctgtatttcctccaatgcccgatacgctgataagcagcaaaaacaattccctctcctgacgggtggcaaatccgtataacacatacgcatcttcacggatggcctcatatatatagagtttaacctccttttttccctgtacggcagaataagtgttcaacgacacattaattccatatcctaatccattacactctacaaccacccacgccggagtagcatccacaagttctcctttgatatattcaatcatgtttttctaacaatttataaaatggagaacaaaaataacgataagaaagttataaattgtaagttcagccagatttttttggaattcgtggctttattgcttgtttggaatgattctaattctgtatttttgcgccaactaaaacgaaacaacttaaaacaaataagaaatatgaaaaagattagagcagccgtagtaggttacggaaacatcggaaaattcacacttgaagcgcttgaagcagctcctgattttgaagtagcaggtatcgtacgccgtaatggtgcagaaaacaaacctgcagaactggccgattatcctgtagtaaaagatattcgcgaactgaaagatgtagatgtagctattctggcaactccgacccgcagcgtagaacaatatgcaaaagaaatccttgcattaggcatcaatacggtagacagcttcgacatccacactcagattaccagcctgcgccgttctttgggtgaaacagcaaaagctcacaacgcagtagctatcatttctgctggatgggatccgggaagcgactctgtagtacgtgcgctgctggaagccatcgctccgaaaggaatcacttacactaacttcggtccgggccgcagcatgggacactctgtagccgttcgcgccattgccggagtaaaagatgcattatctatgactattccggtgggaacaggtattcaccgccgtatggtatacgtagaactggaagaaggtgcagatttcaagacagtagaagcagctatcaaagctgacccctattttgtaaacgatgaaacacacgttattcaggttccttgcgtagacgacctgaacgatgtaggtcacggtgtaaacctggttcgtaaaggtgtatcaggtaagactcacaaccagctcttcgaatttgacatgaagatcaacaacccggctctgacagctcaggtactggtttgtgtagctcgtgcttctatgaagcagcaaccgggatgctataccatgattgaagttccggttatcgacctgttagcaggcgaccgtgaagaactgattgctcacttggtataatacataatctttaacgctacgggccgacttgtcacacagataagccggcccgttttcatttatacattttataaccatttcttcacaatctcctccgtacgcttccacagctcctgctgttgcacatgaggaagatacttcccagataactttacagcatgtccgcttacattcaatgtaccggtacgcttgcctgcctcttcatccagcagcaaaccgattgccgtggctgccccttgccgaggtgtccggataaacggccggaagaaaatatccgtcaaaggatcaaaccacatgtgcatggtgataatatccgtcgaaacaatgcccggatcagccgcattcaccacaattcctctctccttcacacgagctgccagttcaagcgtaaaaagcgtcaatgccaattttgtattgctataaaccggtattcgccagaaactccccttctttccacgcaagaaaaagtccggaaaatcaagtctgccgattgcatacgtacacgacaccatgttgactactctgctcccctctcccattagtggaagtaacttgcgtgtcaacagataaggtcccacataattcacactcaccgtacgctccagtccatcctccgtcagtctgcgaccggtttccatcgtcccggcattgttcatcagcaatgccagtctctccccacgggcacagagtcgctccgcaaagtcagccacagaagccaacgaagccaaatcaatatacatgacctccacctccggattccccgtttccttcaccagccactctcttttagcctcagctttttccttgttacagcaggccattatcacccgataaccagccaacgccaccgcacgggtaatctctgttcccattcctccgtcggcacctgtaatcactgctaatttacgctccatctcatcccttgctttcaattcgttcgatttctttcttcagacaaggcggcaattcctcccgcaaatgctgatgacaagccatgtccaacgtgtacatacgggcaatgcaataattactgtgacgacaattgcaccgtgcattctcttcccgtcgcatacgattcacaaaatcgggctcattcagcaacgcacgccccatttgtaccgcttcaaagccatgattcaatacctcctctattttctgtcgcgacaccagacctcccacatacaccaacggtatatccagtgcctcccgaaacttcaaggcatcttccaggaaataagcctcacggaaaggcacagagggtatcatgtacttacctaccagccgtaccccatacttcaaccaccaacaggtcatgtagtacgtcatggttcggataggcatctcgccccgcatcacatacatcggtgccttactgacaaatccgccgctcagcaccagcgcatgtgctcccaattcctgcagtttccgtgccacttgtaacgactcatccaattccatacctccccgaaaaccgtcgcgcatattcattttcacgagtacagccatgtcatttcccgctgctttcatcacttcctccatcaccatctccatgaaacgcatacggttcgctaacgttccgccaaattcatccttccggtgattggtagaaggggaaagaaactgactaatcaggtatccatggccggcatgtatttccaccgcatcgaatcctgcttcacgcgccaaacacacagaccgtccgtaagccttcgccatttccggcaattcatcggcacgcaacccacgcacaaaagtaggtgaatacaaattgaatccgctgcttgctcctaccggaaggcatccgcaaatactcttatgcgacatattaccacaatgccccagttgaatgcttgctgcagccccttcggcatgtaccgcatccgtcagctcactcagccccggcacaatctccggcctcatccacaactgccggtcgaatgaaagtccactacgcgtcacggctgcatacgccaccgtagtcatccccactccaccggcagccaccgagcgatgataatccagcaattgcggtgaaggcacatttcccggacacatgctttcaaatgcggctgaacgaatgctacggttacgcagtgtcaacggccccaaagtgaccggagtaaataaaagtgaatccatcttttctcctttccctaatatatataaggtataattctttttctgctgcctaccgtctgctttccgaactcctcacaatagcgtttgtaaatggcatcggcacgcggcaccagattggctgctgtccaccatgcaaacacccaggccgcaggtgaagccgtcagcaaggcaaatcctgtccattccaccagttccccgaaataattggcagaagtcacatagcgataaaaacctttctccggcaggtaatgacgcgtatcgcccggcttccgtaaattccggattacatggtccgcatgcagattgatggccatacctatgaaaaagatcacgactcctacccaaggtaaaggatttgtccaaaatgtggccggttcgtactttcccggcaatgcacaactgaaaaagctggcagccaacaaggtcgcattgattacgttgaaaagtatccccatcgccatgatagccagcggcatccggctcttccctttcatcagtaacgggaaaacaaatgagcgctgaaaataatgcagcatgaataatcctacgaatatggcctgcggagtatacgcctctactcctgccttccatgcccaaatccccattaccacaaatgaaggagcttccatcagcacccagcctactttgttcggcacagaccatccccacgagcgggtacgaaacatgccatacccagctttcacaaaataaagtgctataaagactatcactgccaggaaggccagaacatatagcatgatttgataagtttcgtaattcatagcgtgcggttttgcctttgaagatacagaaaatatctgtaaaaaggaaaaaccgcatgctttcttcttacttatcaaccattaattatgaattacttacggttttctctttttcaacactacgttttcaaatctgagacaataaagagtaaaaatccctgcatttctcaccaaaggcgtcagaaatacagggatttcagtatatctgtgaaaaacttacgttattccaccgttacagacttagccagattacgtggctggtcgacatccattccacggcaaactgcaatgtaataggccaacaactgcaacggaatggaagccactaacggattcagacattccagcgtagccggaagttcgatgctgtaatcagccaagtttcggataaccgtatctccttcggtcactacggccacgactcttccttttcgagccttgatttcctgaatgttgctcagcactttttcgtacaaaggcgactgtgtggccacgatgaccaccggcatttcggcatcaatcagggcgatgggaccgtgcttcatctcggcagccggataaccttcggcatggatgtacgaaatttctttcagcttcaaggctccttccaaggcaaccggaaaggcgtatccccgacctaaataaatgaagttgcgggcgtaggtaaacatctttgagaaatcggagatgaacgaatgctgcttcaggacggtccgcatcttttcagggacggcaaccagttctttcaccacccgatgatactcttcttccgaaagtgtacctttttctcgtcccaacgccaaagccagcagggtgagcacggtaacctgtccggtaaaggctttcgtagaagccactccgatttcgggacccacatggatataggaaccggtatccgtagtacgggcaatggaagaaccgatgacgttacagataccatagataaaggctccctgcgacttggccagttcaatggcagctaatgtgtcggcagtttctccgctctgggagatagcgatgactacgtcatcaggatgaatcaccggattacggtaacgaaactcggaggcgtattccacttccaccggaatgcggcagaagctttcaatcagttgcttgccgatgagtccggcatgccaggaagtaccgcaggctacgataataaagcgtccggcacgcaacagttgttccttgtagttggacacggcggaaagggtgaccgtacaagtgtccgtattcacgcgcccacgcatacagtcgctgatgcagtcgggctggtcgaagatttctttcagcatgaagtgggggaaacctcctttttccagctgcccgatattaagggctacggtctgtgcctcatgcgggcattctacattattcaagtcgacaatcttcaagggagcacctgcccgtagtacggctatttctccgtcagagagatacaccacctgattagtgtaagtcaccatgggagtggcatcagaagccaagaagaactctccctcgcctactccgacgactaacgggctactcttgcgggcagcaataatctcgtcgggatgcttacggtcgactactgcaatggcataagcaccgataacttcccgtaaagctaactgcacagcggtcagcaagtccaaattgccttgttgctggatgtaaccaatcaattgcaccagcacttccgtatcggtgctgcttttaaaggtgcaacccttagcctgcagtttttttttcaacacggcataattctcaataatcccgttgtgtaccagtgccaaatcaccattctgactgcaatgcggatgagcatttaccgtactgggctctccatgggtggcccaacgcgtatgagcaattcccacgcaaccggacacatcctgcccttcggctgtccgttccaaatcagctacttttcccacggatttatacacattcaactgatgagtgtcgctcatcaaggccgctccggcactatcatatccgcgatactccaggcgcttcaggccttctagcaatatcggccaagcctttcgccttccgatatatcctacaattccacacatgttacttttaaccttaaaatattatagaaatctacctaatctgtcagcgaaattacgatttctcacagtatagagggaatttagggagagattttctatgaaaacaccgatttttatattaaattagtaccgcagtttcaactttacgaacgatttgtttgtttatatagaaacagaattgaaatttatcaactttaaatcaagaaaaaaatgaaacatttacttcctgaacttccttatcaactggaagcactggctccgaaaatgagcaaagaaacactggaatatcattacggaaaacatttgcaaacgtacatagacaacctgaacaaattgattgccggtacgccttacgaagaaaaaacgctggagcaaatcttgctggaagcggaagggccgatgtttaacaatgcagcccagacctggaaccatacgttcttctttgatacactgactcctcagcagccggaaatacctcaacctttagcagatgcgttgactcgcgatttcggttcggtagaaactttcaaagagaagtttacacaggcagccaccacgctattcggttcgggatggacctggctggtgagtgacaaagacggacatttgtccatcgtcagcgaatcgaacgccggaaatccgctcaagaagggactgaaaccgctactggttatcgacgtgtgggaacatgcctactacattgactaccgcaaccgccgggcggccttcatcgaaacattctggacactggtggactggcagaaagtagctgcccgtctctaagatataaatcggggcctcggcaaatgagcggaggtcccgattgttttatctgtttttacacactatgaaaaattattcggtcttgatgtggttcaccggattttcacgaacggctccccaactgatgagacacacggagcctaaagaaatcaaggctaccaacagaaaggcaacgccaaacacgccccacatcgccatgggtgaatagtgcaggataccgtctatctgctgtacaccgaaccacgccaaaggaaaggccaacagcatgcctgccagcaaagacagcagggagaaacgaagcagtcgtgcccgttccatacctgcactggaaccaaaaacctttcggatggccatgtcgcgcttgcgctggctgatgaaataaatgctcatggcggtcagtcccaatagggaaatcaatagagctgcacacgtgaaggccacaatagtagtacgcatgtgcaacaaatctttgtagacttccttgatttcatcggcataccatttagattcaaagggaataccctccaccacttccgaaaacaaggcatcaagttctctcttatatgctgcctgatcgccttcaatggtttctaccagtacgttccaggaccttactttgtccggatgctctactgaaatcatggtgggtgactgcggaaggagaatggaaccgagtttgatgtcggcataccgcccgcctacagcatactggcggccatattcattccgcaattctgccgtacgcgcgtaatccagctgcaaagaatcgaacgtactttcggagaaatacatgttcccccatttccgtggaagtttcctatcgtcgaacacctggatgtgaaagatgtccaagaaggctgaatcggtacggaacacctgaaaactgacattttgaggcatcccgttattgtcgtaaagctgggtggtattgttgtttccccggtttacaggcgtaccggcggtcaagcagacattctttacaaagggcttcttacgggcttcgtcacgaaaaagacgtatcttttcggaggaaccgactgtcatggcaggatagtcgagcacatgaccgtacgtataacccaacggttcacgcagaatccggtagatttgtgcggacagatagagggtgcaagtcagcatggctacggtgagtccgctctgtaccacatacagtgcccgaaggtacaccgccttggttttccgacggaaagtgcctttcaccacatccagcggatggtagtgagaaagcagaacagcaggtaccactccggccagcaaggaaagcagaacaatgcctatcaaatagattagcaaagtgatggcgtttaagtcgccccagatgtccagccgtgtttgcagcaggtcacaggccgtcggttccacagccttagccaacagcaaagccagcagaaaggctcctgtggtaaacaaggccgactctcccaacaagcgccagaagatgctccgtgcggaagaacctaacagacggcgggtagccatttccttggcacggtagcttacttgtgccacacacatgctgacgtaattgaatacggccatcagcagaatcagaatacctgccactaagaatatccagactttcaccggattgtactgacgcagctgagggctcattatttcggagaaacacacgtctttcaacggcatccagaatgcctcacggaacaactcatgctgatatccccaggaaaaggttttgagaaaagacagcatatcggcagctttctgatcgggattgacaccttgaggaaaacggaccagtatcgtcgtccctcccatgttgttcatatccggattgcgcatactgcttccccagttcacaaaatccacatagtcgaatggtacaatggcttctacctcatcggggataacagagttatcaaagtcttttatgatgcctgtcactgtgtacatctccttcttgtctgcagacaaacgaagcatcttgccttccgcaggttcatccccaaacagtttacgggcagccgattcggtcagcacgatgctatgtgcatcgaccagtgcctgttccggatttcccgacaacagcgaatagccaaagaaacggaggaaattatctttcacacaatatatttcgaggctggttttccggttttctattaccgcataactccccgagttacaagcttcagcattcacagcgcaccagtcggccatttccggataacggttggccagccgttcacccaccaggtaattgctggcgctatattcctcgttcgacaacacataaatatgctcgatgtcctttatatcgctgcccacagtgagctgccgcaccaccatattggcaatgagcagcacaaacatcagagagatgcccaatcccgccacattgaccagcgtaaatagtttgttgcggtgaagataggtaaaataggttttcagtcctttcatcgtattttatagtttaatgtgtttattccgtcttaatactccgtacggggttttcattggcattcttccagcactggaatgtcactgtcagtaccgtaatgagactgaccagcaggaaggaggccacaaatacccaggcacggataggcgtcttgtcggagaagctttccagccagtcgtgccctatccaccaaccaaagggaactgccagtacgaagcagaccaccagcataacgaaataacgcttggtaaacatatagagaatctcaccagtggaacttcccatgattttccggataccaatctccttccggcggtattcgctttcaaataaggtcagtccgaacacgcctatcatgctgagcacgatagcaatcaaggagaacaacagaatctgacgggtgaaacgcagttcctgatgatagttctggtcaatcacctcatccatgaaacggaacttgaagtcacgccccggagctatcttttctgcggcctctgtcaagcggtgaatcatgtccaccttatctacccccgaagccacccggatgttcaagatgctgttcgcatcccagacatcccagtccgcataatcttttccgtaaatgaagaaggccatcggctctacggcatcgttgttgcggaaactgctgaaacgaatattctcacagaatccgaccataggataatcaccaagagtagcgggttcgtccaccttcatccagggatatttcttccgggctgcttcgttgaaaatatacacatctccgtcgcccggtttaaagttcctcccctcagtaatcttgatgccaagcacagataagtagcggtaatctaccggaaaacagaccaactgtatgtaacgctctccttctcctcttccccacgacatgtagttatcggctgaacttaacacgaacctggaaatcgaaatgccttctatacccgaaaggccggacaattcactgacaatcgcttccctgcgatcgagatattcataaggaatcgctcccaccagtacgacctccttgtcatagccatagtcgctctgctgaatataacggctctgcaggtacatgatgcccacggagataatcagcatgaaagagacaaagaactggaaacaaaccagaaacgtacgcagcatctttcctttcggggaaagaccgaacgagcctttcagtaccagtgccggcggaaaagaggtgacgtagtaagaaggataggctccagccagcaagcccatgcacacggccattccgcccaaagctatcagtaggttcggatgattcatcaaagagaggtctgatgccaccaaggtattcagggaggtgtcttgcaacagatagagccagagcaaggacaacaggaagccacacacacaaaccaatacggattctaacagcagatacatccgcaaggagaaagtggaagcccccaacaccttttgggtattgatggaacgtaaccgcatgggagtttctgccagtgagaagttcatgtagttgactgctgctgtaagcagaatcagcaccgatacacacagcagcaggtacacggcggccttgctggtagccgccttgttgcccaccgtagaatagtgcacttcgtccagcggtgtaaaatgaatgaaattctcccagtcttcctctccctctccgctaatcaggtctcttggaatattcagcttgcagctttcgatgaccgaccgctccacatcggtcaatgaagctggactgtcaagccggatatacaaggcataattccagtttctccaggaatctttgttcaggttcggggagtaggaagaaaagacacagttccctaactgagagttttccggcatgtcctgataaacccctcctatcaccaacgactggttacgggatttacggtctacataaactgtcttaccaatggcatctgtagtaccgaaaaagcggagagccatggatgcagaaatcagggcatgattgggttcattaagcgaagcggtcgttccacagaccatagtaggctgaaatacctccaggtaatcaccaaatcccgtaaaccaaggttcagagtaaatgtgttcgtctacctcaaaatcattgagagagtttgacaatgaagtaactgaaatggcctgtatgtgtggagaagaagctcccaccagctcacagaaaggacgagccagccagatttgccagccgtaatctccgcctgcattcatttctacccggtaaatacggtcgtgtgccggataggctttgttgtagttatagtcgtagtccacctgcgtcagaatgacgaaacaggccgcaaaggcaatactcaatcctaacagattcaatacgctggccgtaaagaaacgccggaaggtatgcgagaaatttctaaaaagtgtgttcatgagtggtaagtgtttttatactgcaattacgaaatttattcaccgactttcaacctccgggtagaaacgctaccgattccgtctttggagatttgagccgatttagcttttccacttaaagtgagactaccgacaccttctatgctggcatccaggtgttcgcaatctacggccagttcaccgcttcctacaccttccagactgacttgcacattccgggcatgcaaatcggccacgtgcagactgcccacgccttccacatcaaacttcacatccttcaggttcaggcgggacttgcaattgaatgatccgacaccttcaaaagctactttctgcaaatcgggtgcactgatgtaaatagagagtccgttcacgtttcgggtagttttctttcctttctcagcccacgcaatcagcaatactccgtctttcaccgtacactttgtctggtttacccatttcttttctccctctacacgaagagaataggtatccgactgagtaaaatacacactggccacactctccacttcaatggaatggaaaggattcacactgcgggtttcacttactttttcttcgttaccacttcttgcactggcacagtttacacacatcaaacccatcatcaaacctgctaatatacgtactatctttttcatcacaatttattttttagtttaacaccaatacttcattatctttgtaactctcataaccggaaacgatgacgcgttcgcctttttccaatccttccagcacctcgtaatactgcggattctgacgtccgatgcggattttacggcgataagctttctttccttctttgtcgaccacgaaaatccagttacctccggttacctgaaagaaggttcccttcggaatcaacacgctttcggtaggctcacccaactgcaagtcgatgtagtaggtctgtccgctgcggatattttccggacggttgccctgaaagatgaaatccgtacggaaacgtccctcacgcacttccggatacaccttgcgcacctttaagttaaacgaagaaccctgacgttcaaaagtagcgggcagcccgttagtcacacggtcgatgtagtgctcgtcaatcatggcctcgattttgaagtccgacaaatcattaatctgtcccaccatctgtccggcggtgatattctgtcctaactccgcatccagcaatcctaattctccgtcaatagtagccttcacttccagtttatccttccgttctcgaatcagcaagacattcttgcgcatgttctgcaagttatcttccatctggtccatctgaatgttacggtagatggagtcctgcaccagacgctccgtaatcagtttatgctttttctgggccacttcataatcttccttggcctgaagatattcttcgcggctgatgagacgttccttgtacagacgctggtactgctggaacgtacgctgtttgcggcgcgtatcaatgtcgagctgtactttctcggtttcgttgttcaacttgtcctgctgcatggtgacctgcgtattacggagcaggttctgcttttcggccagttcagactccgcattcagaatctgcaaatccaggttggagttactgagacgaagaatcacgtcgcctttcttcacatgagccccttcttccaccaccttttcctgcacgatacctccctcttcgggactaagctgtaccacggaaataggctgcacctgcccgttcacacggatatagtcattgaactttccataagtcacgtcagcaatgttcagtgacttaccatcgactttcaatgtagaagcatgattgccgaaaataatccagcccaacagcagaagaataacggctcctcccccaatataaggaagatgtttcttctggattccttttttcttttctaactgtatatccataatatcgtcttttttcaatttctatttatttgtctgaggcatcaaacccacgaataatttcttctcccttgtaatagtctaccagacggcatttcatcaggtaggtcagcttgctttgcagcagcaaggtctcgctttcgagcaaggtggctgcattgttctgtacatcgagcgaagtcatcaagccttcttcgtacttgcgccgggtgacatgataggccagtgagtcggaactgactttcttttccatctgtatgctctccttcaggtagccttcccggtcctgtacggcctgaagcaccaatttctgcaattcctctttctgcgattcatattgttcacaagcaatgcggtaattgttttttgcctgacgcatgctggtcactcccgaaagccggttgaaaataggaatactcatgctgatgcccacgtaggaaccgaagttattgttgaactgggtacgaaaatcaggataagccgtagaatgaagttccttataataagaactggagattccaccgaacaacgtgatggacggtaccacattggcccatgaaattttacggcgcatataggccactttcgcattcagtgcagcttgctgcagggtaggattgacattcagtgcgatacggaacacatcgtccgcacgctcctgagtcaactgaatatattgaagtgtttgtgtatcgagtacggcagtatccaactgtaaagtatcttctgccggaaaattcattttctgtttcaatgtcagcaaggctgtttcatacaagttcttctgatgggtgaggttgtaactgtccgtagcctgctgggcttccatctgggctacatccgacaagcctttcaagcctaattcctcctgacgacgtgtcttgtacagcagcgaatcactttcctgcaatttcttgcgggccagtcgcatcgtgccgtagcaatacagggcatcaatataaacctgaaaagtctctaacgctgtattgtctttagcttcctgccaggcagcttttcccatcagccaggcagcctttgcccgacgcacctcgttcaccagtcccccaccacggaaaatgggcatggaagcttccatggaataaccgttgttgaaagtagacaaggtgttgtaggtattggtttccggatcgaccgaacgaccgaaattatattgtacgctggtactagcagttaccccaggcaagaaactaccgatagccttcatgcgatccaatcttgcattgtctgcttccagttcccgctgccggacggtacggttgtgctgtacggcgtagttcatacaacggtctacgtcccatatctcctgtgccgcagcttccagccccatccaaccggaaaagaagcaaatcgtcatgcgtaatagattctttttattcatattgttttattttatccgcaaaagagcattcaaataccgtgccaaagttttatttcattcattttcaacgagatataatattacacagaacctcaagtgtctaattttttgacaatgagtgtctaattttttgtcactgtacatattttttagacatttttgagggctatgccttgaaaattcctatttttgtcgcaaaatctcaatcacagatggcaaaacaaggaactttactcgttgtagatgacaaccgcaacatacttacttcactgcaatatcttctggaagaatatttccagcaagtaatcaccctgaattctcccgtaaccattccttccctgctacagcgggaagcgattgatgtggtgttgctggacatgaacttttcttccggtatcaacagcgggaatgagggactttactggttgcgcgaaatcaaacggttgcgtccacagattcaagtggtattgttcactgcctacgccgacatcaacttagcggtaacgggactgaaggatggagcgaccgacttcatcgtaaagccttgggataatgccaaactggtacagactctgcaagaagcctatgccaaagcccgtggaaacgaaaagaaaggaaagcaggcctcacaaccgacggaaaaatcgagtatgtactggggaaattcttccgtcatccgtccgctacgattgttggttgagaaggtcagcacgaccgatgccaatatcctgattaccggagaaaacggtacgggaaaagatatgctggcacgagaaattcaccggctgtctccccgccgcaacggtccaatggtagccgtcgatatgggagctattaccgaatcactgtttgaaagcgaattgttcggtcatgtaaaaggttcgtttaccgatgcacacaccgaccgggtaggacgttttgaagctgctgatggcggaaccttgtttctcgatgagattgccaacctgccctatcatctgcaagccaaactgttgacggtgattcagaagcgctattttatcaaggtgggaagcaatactccccaacctaccaatatccggctgatttgtgccacgaaccgcaacctagatgaaatggtacacaacggagagttccgtgaagacctgctgtatcgcatcaacaccattcatttgcacattccggctcttcgggaacggaaagaagatatccttcctctggcacaacgtttcttagagcaatataatcagcaatacctgcgcacactgaccggcttcagtgccgatgcagaacaacgcctgctgaattatccctggtatggaaatatccgtgagctacagcataccattgaaaaggcggtcatcctttcagatggaaatctgttgaaagctgaaaatctgcaactggcagaagtttcgggacaggatgctccggccacacacgaagaaagtaaagaagacactccgctgcaaaccttggacgagatggagaagaatctcgtcaagaaagccatcgaacaatgcgatggtaatttgtcacaggcagcggcacaattgggcattacgcggcagacactttacaacaagatgaaacgtcatggcatctaaatggttatcttctccgctggcacggctcgcattcctcacaggaggtaccgtattgctgacactcggtatcagccagaatgagaacgaatggctctggataggaggttttctgattgctttagccatctatctgttttatgccagccagaaacagttgcgcgaaaaaagctggctgatgctggaagctatccgcaacagagattattctttccgccttcctacacatggcttcatcggaggagaacgtattctgcaaaatgcgctcaacgagttcggtgccatgatgggcgagcagaaacaattgatggaacaacgggaacggttttatgaacaggttctctcgggcatcagttccggcatcatcgtattggacgagcaaaataaaatcatacaaagcaatccggctgccacaaggctgttaggactaccagccctcggtaccctgcaacaactggagcgttatgggaatgagatacccgaattactcagctcgcttcctgccggtgaacggtgcaacctgcaatacgctacctccaaaggggaaatccaactgttagtgcgtgcttccatcatggaattaggaggaaatacggtaaagattctcactctgaacgatattcgtaacgaaatggacacgaaggagcttgaatcatggataaaactgaccagggtattgacacacgaaatcatgaactccatcgctccgatttcttctttgagtgaaaccttcctgctacgaaaagatgtaattgatagtccgatttacgaaggtatccgtgccattcatgaaacctctaccggacttatttcctttgtagacagttaccggaagttttctgcgcttcagaaaccttcaccagagccgttctatctgaaagaactccttttgcaggtaaaaagcattcacttaatcccctcgcacattcagctgactctccagattgagccggacgacctgatgctgtatgccgaccctaacctgattcgccaggtacttatcaatcttctcaaaaatgccacacaagctattggagaaaataaaggaaaaatccacattcgagcctattccaccaaggaagaacatatcttagtctatgtcagcaacgacggtcctgccatccctgaaaaggaagcagaagaaatctttgtaccgttctttaccactaaaaaagaaggtagcggaatcggtctctctctttcccgacagattatgaagctttccaacggcagtatcagcctgctgaaagcagaaactaacggatggaatactaccttcatactggaattcttttaaacgcagagaagccccgaactacagtcattcagggcttctctacacaaattgaatcataacaactaacggtatttttaaaccattgctaagccggaagaatccgactcacgttttctcaaaagcattttcaaaccttccaataagttccgacatccgtcattcatttcctcattgccattcctataaccaaaatccacatcacatgagggcatatcagctttagacttgcgtttgcagatatctgcaaacaaatgaattttgtgccaattacgataatccataaagcgagtcagcaaatctttctgccacggctccattactactacgaagtcggcttcatcacgtaaaacttcgttcatgctccgttccaactttctccctcccggagaaccaaattctgtcatctcagctgttaccacctccacatcggtcatgtcagcttcggtgagtttcttcttaaaaagagactccattgagaacagctttccgacacgttccagaccgactaatagcactttcataatatcaaattttaaaagttaataaaaagaaggtactgaaaatcctttctcgaattaaatgtaacaatttaattcggtcaaacaaagcgaataacagaatattatcataaaatacacattaattatgatttaatatactaaaaatgcaaattatgataatttattatctacaaacggcttccttgaatgatatcaatcaaaatcggacgcattcctccgacaaagcattccactgcaattaccatcagaatcaaccccatcagacgcatcatcacattattacctgtttccccaataatgcgaaccagtttcgtagataaacgtagaataatataagtaagtatatacaccaaagctatcacggaaacaagagtaactttcaagctccacgtatgagcatcatccatcatgataatgccattggcaatagcgcccggtccacacagcatcggaatagaaagtggtgtgattgaaatatcatttgcataagctttgatttcctcgtctttcagcttcgtattggtataacgtgcctgcaacatatcgtaaccaatcttcagaatgataatacctgctgcaatacgaaatccattggtagatattccgaaaaacttaaacaagaactgcccgcaaaatgtaaatgcaatcaatataataaaagaaatgattgtagctcttttcacaatatgctgtcgctccttttcttccagcccattcgtcattgtcaaaaagaccggcattgtacccaaggggttggtcaacgtaaaaaaggaagtgaagcacaacagtgcataaggtaagattgtatccataaaatatatattttaaaaacttaaaacaaagatacaataaaatctgggttatggatacaaaaaaccctgaagcatttctgcctcagggcttctgttaaaacggcgactacctactctcccacttgcgcagtaccatcggcgtgacgaagcttaacttctctgttcggaatgggaagaggtggaaccttcgtgcaatagtcacctgaatatcatttatgttattcatgactcacaagcaagcaacttcagcacttctttcatgctaaacgtatatatcatcctttctgatgactgtttccatccgctccgcgcggataaggaaagctgacgggcaattagtaatg

SEQ ID NO: 3754 - DNA, 61772 bp, Unknown
  gut microbiota DNA sequence
ctaattgttctcgatttagttatttcaaatgcgggtctgggtacagagaggttgacttgattaagtcaaccttttttattaccaatcaattcttatgctccatgaaaaatcgtattgcagagctcgattacttgaaatccatttttattttattgatgattgtgtttcatcttgtatatatcggtgacaaatatccatacgctaaagctttggtttatactttccacatgcctgctttcttggtcatttccggttatgtcatgaatatagctaaaggaatacgtccgtttctgcgtacaatgtggtggatttttattccatacgctgtgatggaaacaggttatgtcatcatgtctgctattctgccggttcgtgaatcagtggagcatctaagtgttcctctatggctggataaattgttcttacatcctttgggaccctattggtatcttcatacgttgatgctgtgtggacttgtttatttattggtggacaaattggctggaaagtggagtaataccgtttccgtcttaattatactggccttatgctatgccgtattgtcagcttgtggaatactttctttaataaatgcgctttactttacagcaggagtggctttgagacggagctcgataaatttccgtactttcttttcagcttcattttgggctttgttgcctgtaatatggctggctgctgatgagacaaacctgaataaatcaactctttcaggggctgctctgacttatctgatgattagttttctgttggctgtatatcgctatttacccgattatctgaaaaaaggattgggttacataggctctcatacctttgtgctgttagtattttctccggtatttacaatggcagtgaagcctttggtgcctgtattggcttttgaacctaccgggatgctctttttatgtgtgtccttatgtttctgtgtaattggttcgtttgctatagcctgggggatggataagctgaatttgtcccgtttcttctggggaaaagcccgcatgctttcgtagatagacttggtctggtgacatcttgtcagttcgctggaaaaaatgtggcaggaacttatctggcatcttttttgtggtttacttcatagatattgaattacttacttaaacacatagaactatgatttcagaaaaattgcaaaatgccatcaacgagcagattactgcggaaatgtggtcttctaacttgtatttgtccatgtctttctacttgcagaaagaaggtttcgacggttttgcttcatggatgcgtaaacagtcacaagaagaattgcagcatgcttatgatttagctgattatttggttaaacgcggtggtgcagctaaagtggataaaattgatgtcgttccacaaggatggggcagcgtacaggaagtatttgaacatgtttacaagcacgaatgtcatgtatccagcttgattgacgagttggtaaatgttgcttctgaagtaaaagacaaagcttcacaggatttcttgtggggatatgttcgtgaacaggtggaagaagaagctacagcacagaacattgtagagaaacttagaaaatgtggcgacgcagctggcattctgtatttggatgacaaactgggacaacgtaaataaaccacgtttttcatgaaatattgatcctggatggaagcggaatgatttctgcatccattcaggatattttgtatcataattacactatcctttttgtttttccactataaattttatctttgtcccccgttatcaaccaatattagtgtccgaaaaatgggggattttatattaagagggtggaactggtgtcgtcgtttccggcatcgttgcggatacggagtacattctccttccgatttcttttttattacgtttgtcatttacgaacgtttaccattctatgcctatgcaccattgcatcacttgagacgtgtggtggcttttttgcctcattatcgggaaaaggtcgataagttcttattccgtctgattaatcacctccggccttctgtagtatgggaagtgggaactggcagcggaataagtacccgttatatggccgaagccaatacaggcatgcaggtttatacgttctcagaacaatcggaagatgcagtgaaacggattctctccggtaaatcttctattgattacctgaccggaaactgtgaagcagatatggataggttgctcaaggagggagtaaagccggaagtggtacatatcgcccatactccagcgtataaggagatgtttgaacgactgattccactggccgataaacatacttgtttcatcatcggtaatccttatgctactccagagaagaaaagatggtggaaggaagttatagcagatcttcgtacgggaatcacattcgacctttatgatgtcggactggtattttttgataaagagcgtgtaaaggagcatcgtattgtgaactttctttgactttaagaccttaaatatatgaaaatgaacaagatttataccaagacaggtgataaaggtaccacctcgctggtaggaggagtacgtgtttcaaaagcagatatacgtctggatgcgtacggaaccatagacgaactgaattcttttatcggattattgatttcggtaatgaaggatgcagagcatgaagagttattacgctttgtgcagcataaactgttttcattgggctcttatctggctaccgacttggaaaagactacttttccagtagaaagtcatatctcactggagaatgtgcagcgtctggaacaggctatcgatgagataaacgcttctttaccgtcgcttgcaggttttatccttccgggagggagttatccggcttccgtttgtcatgtctgtcgtacggtctgtcgtcgggcagaacgtcggattcaggccttggaagaaagtctttcctatgaattggaggagcaggcaaagtgttttgtgaaccgattgtctgattatctgttcgttttgtcacgccggttaaacaatttaacagacgaaagcgaaatttattgggataagcgttgcgagtgaaagaatttgttatatttttgcgaatcaatataaagaagtaaaactgtttaaaattatatactatgtattggacattggaattggcctcaaagctggaagatgctccttggccagcaactaaagacgagttaattgactatgcaatgcgttcaggtgctccactggaagtaatcgaaaacttgcaggaaatggaagacgaaggagaaatttatgaaagtatagaagatatctggcctgattatccgagtaaagaagattttttcttcaacgaggaagaatattaatagccgtcagggcagattaaaagattaaatctcagcgggatgaacaaagtatatttgtttgtcccgctgatgttttatagtattccatcggactttctcaataaaagttataaacacgcgtttctctcaacttgtttgattcaaaatttgttcttattacaaaatgcactatttttgtgcacaaagaaaagaattgataacccgttattttgtgaattatgaaaagattgctgttgatggcgctggctgctgccatgctgactccggcttgtggaaataatgctggtaaagaaaccaaggcggaagtacaggagagtgcagccgtacaagctaatgttactcatctgactaaagccgatttcctgaccaaggtatataattatgagaagaatccgaaagaatggaaatacgaaggtgataaaccggctattgtagatttctatgccacttggtgtggcccatgtaaggctatcgctccggtactggagaaactggccgcggaatataaaggaaagattgtggtctataagattgatacagataaggaacctgagttgtcggctgcttttggtatacgcagtatcccgacccttctgttcattccggcaaagggaactcctcaggtggcgcaaggggctttgcctgaagagactttgagaaagaccattgacgaatttttattgggaaagaagtaaacttctgataagaaaaaataagagggcctgaagttgttggaatttcaggccctcattgtatatttctatctacggttgctgtcttcaatcaattcacggattgtctggttcagttccttttctttcagaagttgttccagtgtgaggtgcattctccatcgccagtaatgccgtggatgggccggtatgttaatgcgctctccttctatatccggattgcgtaactgttcgttgatgctcatccagtcctgccatgccaaaatgcagagcagggaagggcttttcaggtgatggaagacgatgtccttacagagccatccgggagcatgtacgggaatctctccctgatggtgcatttcctgatgatagaagcgctccgtgagggctgggtcttcttcccaccatccgcggaaagtggacatgtcgtgcgtaccgatggtgcataccgacaggaacggatagttttcagggtgtccgaagtcttcgtacatttgtttgggcatgcgttggatttcaagtgagagtatctgcaattgtctcattacccagggcacacactccggaaccatacctaaatcttctccgcatactaacataggagtggattgggtgagaaccggaagttttttcatggcttcctgataccagaattcgttgtggcgctggtagtagtaatgattgtacaggtggttgaaggctccctgttgcttccagttcagctgctggaatacggaatcattctgtacggcaattctgggatggagtttctcggcgtcgtggtggtctgtgacaaacagcacgttgctgatcagggagtaaagcccttctttcagtttcaggctatcctcgtcttcttttccattgaaataagcttccacctttcgctgggtatcaaactccggcagtaatgcgtagcctccttttccattgggcgtgataaaacgttgccgtacgtactcactttgtgcgccgaagacttcttccagcaccttgtcgttgataaacggctgcgtcatgaagtcccggtccagattcagaccaaagcttctgatttcatccatgctcaggggaagggaaggggagaactgtccgagcagaccatgtaccgaatggtcgggaatttcccagatgcggaaaaatcctaagatatggtcgatgcggtaagctgtaaagtattctgccatcttggagaaacggcggcgccaccagcggtaattgtctttttccattacttcccagttataggttgggaatccccagttttgtccgttgacagagaacgcatcgggaggagcacctgcctgaccgttgaggtggaaataatggggttctacccaggcttctacgctggaacggctgataccgatggggatgtcacctttcagcagaatgccttttgctctggcatacgtactaacggtaagcaactgcacgtgcaattggtattgcaggtaatagtagaaggcgattttggtataggctttgttttcaggcgtacacagtctggctatttcatcggcatcgtaagtagaatatttcggccagtgattgaaatccggtgtgccatacgagtcgcgcaggtagcagaaagccgcataaggctgaagccattcctcattatgccggaagaagttcaggaaatcttccgaggcaagtactttttttccttccatctggtacgcttttctcaggtagtccatcttcagcttgttggccttctcataatccatcatggggagggaattcacttcgatgcgtgctttttcgaacgcttctgcggctttcttgtccttcaggggtgggagctggcgaaggtcgatgtacatcgggtgaaaagcgtagatggagatgctgttatagggataagagtcagtccatgtaccgctcattgtcgtatcgttgatgggaagaatctgaatggctttctgtccggtctcatctgcccagtcagtcagtagcttcaggtcgccgaagtcgcctacgccgcaactgccttccgagcgaagggagaacacgggaatggcgcaaccggctatccgttgcggggcatcgtcaaagaacacttccgtttccatgggcagataggtttctccgcgttgcaacggttgcagagggaatatccggttggggcgggtttcccatttctctacggctccggtttcttcatggatggccacgaacttatactcaaaaggatattccaatgaggaggcatctagtgtcaggtgccatacgttgggctgtacttccttcattctcagcgggcggcagtactcccaactacccagtgccgcacagctcccgatgaggcccagacgctgtccgtgggtactcaggccggggcagagtgcgcggaaggtgatgcacctgccggtattgtcagacaagcgggaaggctgttccggtgtgtatgcattgttgaaagccgatgtatagcggtaggcatcttgtggcagatctctccagcagtcttctacgaggtaatgctgctgttgcaggttgcccggatagaaagaatgggggatggcgccaaattcctggcgtacaagggtgccttgacggcttacggcataacggtagcagataggttcggaagggtgaaagtcgaattctgcctttccggtccattcttctccgttgcgggtagtcatttctacggtatgttgtatgtgattctggctgagaagcacgcacaggctttctccccagactgtacggtattgtatgcgaaaagtaattttcatatcttatgtattagttgtggctcatagttttgtccaaaaataatgaatctcatggattcatgcaaataaaaaacctccggatgtcctttcggctccggaggttccctcgtgtaagatgtgaggatggatttaataataatgaattaaaaaatgagattatgcgtcgatatttgcatacgtcgcatttttctcgataaattcacggcgtggacctacatcgtcgcccattagcatggagaatatatagtcggcttcggccgcgttttcgatatttacctgtttcaggatacgggtttccggattcatggtagtttcccacaactgttccggattcatttcacccaaacctttgtaacgctgggtgtggatgccttgctcgtttccttcgccatatttctggatgaaagcctggcgggcttcgtctgtatagcagtattcgctgattttacctttgctgcatttgtacaacggaggggtagcgatatacaggtgaccaccctgaattacttcaggcatatagcggtagaacagtgtcatgatcagtgtgtcgatgtgagaaccatcgacgtcggcatcggtcatgatgatgaccttgtggtagcgcagcttgtcaatgttggctttcttgctgtcttcctcaccgtctacaccgaaacgtacgcccagtgcctgaatgatgttgttcacttcatcgctttcgaaagctttgtgccacatggctttttccacattcagaattttaccgcgcaatggcaggatggcctggaactgacggcttcttccttgcttggctgaaccacctgcagaatcaccctcgacgaggaagagttcgcattcttcggctacacggctggagcagtcggccagttttcccggcagtccgccgccgcccatcggacttttacgctgaaccgattcgcgggccttgcgggcagccacacgtgcggtagcagccagtaccactttgtcgacaataatcttggcttctttcggatgttcttccaggtaataagtcagggcttctcccacagcctgattcacagcaccgctcacttcgttgttacccaacttggtcttggtctgtccttcaaactgaggttccgatacttttacagaaatcacggcaatcagtccttcgcggaagtcttcacctgagatttccaccttggctttttcaagcgccttgctttcttctgcatatttcttcaatacacgtgtcagtgccatacggaatccggcttcgtgtgtaccgccttcgatggtgttgatgttgttcacatacgagtgaaggttttcacggaatccggtgttgtacataatggcgcattcaatgggaataccctgtttttcggtattcaagtagattacgtcatcaatgagcggtgtattgttggaattcaggaaacgtacgaattctttcacgccttcttctgagtggaacttttcctgtttgtaagaaccgtcttcctccttcacgcgcttgtcggtcagggtgatggtgattcctttgttcaggtaagccagctcgcgcatgcgggcctgaagaatgctgtatttatattcggttacggtgaagatacttccatccggccagaaagtctggcgtgtaccggtaatgtcggttgtacccacttcttttacggcatacagcggctttccgcattcatattcctgctgatagatttttccgttgcggaatacgttggtggtcatgtgagtagacaaggcgttcacacaagatacacccacaccgtgcagacctccggaaaccttataggaacctttgtcgaacttacctccggcatgaagcacggtcattacgacttcgagggctgattttttttctttttcgtggaaatcgaccggaataccgcgaccgttgtcttgtacggtaatcgagttgtcttcgttgatagttacttctatatgtgtacaataaccggcaagggcttcgtcaatggagttgtctactacctcgtagaccaggtgatgcaagcctttttcgctgatgtcgccgatatacatggcggggcgtttacgaacggcctccagtccttccagcacctggatactgctggccgagtagttgcttccgctgttttgtgtcagttcttcactcatgtttttttcttcgtttttttaagctttcaaagatactaaaaaaactggaacgaagcgattttcagcactctaaaaatcgtgaaaaagacatgaaccgagtctatacgacaaaaggccagatgtaatcatccagccttaatatctttcttgcgtcaagcgtagacttaagccaatttgctgatgtgagcagccagtttagacttcaagttagcagccttgttcgcgtggataatgttgcgcttagccagcttatccaacattttctgtacactaggatacaatgcaacagcttcagctttgtctgtagttgcacgaagtttcttcactgcgttacgcattgtcttagcataatatctgttgtgaagtcttcttttttcttcctgtctgattcttttaatagatgatttgtgatttgccatctcgactaatctttaatattgttcttgatttttgtttattatgtagcccgtgggggaatcgaacccccctttcaagaatgaaaatcttgcgtcctaaccgatagacgaacgggccatcctttatttcaggaagaactcctgaattctcacgaggatacatatctctcgtttgcggatgcaaaggtaggaagaattttgaaatctccaaaacattcgctcctttttttatgaaatttgctgtgtttttttgagttccctttcattaaatggaattccttttgccgttttttaggtttctcgtggctgaaccttatgtttcccttccgtaaaacttacggttccgccttgagaaacgtaggtttcgcgggaaggaaacgtaaaaagtgcctcgtggtgtgaagaaaaagtttacgggttttgtttgttttgtataaggactttttctatctttcgtccgcaaaaatggattttatatttaggataatttgaaagatggaatgctgtaaattaaggtccgtcggcctgtataatggaaaggtctgtctggcagaatggggagataaagaaggggagccttcttctttccaggtgttggctgagtgtacggaattagtgtatgtgcgtttacgtacgttggaggcggtggcctcttttcgttttttagagagggctcttgccgtgatggcgcattatgacatgcctgtttttgccatggcttcttcggccggaaatttttctgtggtgacgggagcggatgcttctgctttgcagaatgtttgtaaggaactttccgtatttgcggaagtgacggtggagaaagaggtggaagtgatatgtgtacaagagacggctgagcgcaaaggggagatgtcggaaaaaggtctggtgactttgctgaaggatattcctctgctgatggtgtcttctgaagaaggttcgggcagtgtttcgctgacggtgcggagaaaggaccgtgacaaagtgctgaatttgttctttgcttgctgatatgttgcagaagttggatggagtagtgctgcacgtagtaaggtacagtgacaaatcgaatattgtgcatatctatacttgtcagcatggaagtatgtcgtttgtgatacctgccacgcgttcgcgcaagtcgctggtaaacggggcgttgtttcgtccgctttccctggttgaggtggaagccgatgtgcgttcccgtacttctttacctccggtgaaggaagcaagattgtcttatccgttggagtcagtaccttacgacccgtacaagttaagtatcgcgatgtttttggctgagttcttgtcgcatgccttacgcgaggaagggaagaacgaaccgctgtttgcttatctggtgtcgtctattcgctggctggatgcctgcaggagtgattatgctaatttccacctggtgtttctgatcaggttgtccaggttcttgggtttttatcctaatctggaagattatcgggagggaagctggtttgatatgttgaatgcgtgtttcgtagagaacaagcctttgcacggcatctgtctgtctccggaagagtcgtcgcatatctgccagctggcacgtatgaattatgaaacgatgtttctattcggtatgaaccgtatggagcggcagcgttgtctgactgtgatgatggaatattatcgtctgcatcttccggaattccctgaactgaaatcgcttgatgtgctgaaggaactttttgcttgatacctgagtgacgatgggaataaaaaaacgggactctcctttcatttgagaaaagagaatcccgtttttttgatggggatatgaatgatcttatcccagcaattcttttactttggcagaaattgctctaccttcagccagaccagccagttctttagaagctactcccatcactttacccatgtcttttccgctggtagcacctacgcgggcaatgatttctttcagtttagcttccagttcttccggagaaagctgtttcgggaggtatgcttcaatcacacgtacctgagccatttcttcttctgccaggtcggcgcggccttgtccttcgtatacagaagctgaatcttttccttgtttcaccagtttctgcatgattttcagggctgcatcatcggtcagggtatcgttggcacccggagcggtttttgcttccagaaaacatttctttacgttgcgcaaagtctccagtctgactttgtctttggctttcatggcctctttgatatcgttgctaatctgttcaaataaatccatattcattataaagtttaaatgttgttctcttggtgatgtttagaaagtaattgtcatagagccggtattggttgtggtttccggttccggtgcaatcttttcttctgtagtcgctttcgaacggatattctccagttccatcttggtgcgcttgtaggtaggggttgtttctaccatgctgatgatgtcatcgttggccaagtcttcctgactgaagatgtagatgttcggacgtttcttgcggatgctgcttttcaggatgctttttccgtagtagtcgcttcgacgttcgtctttcttttgctcttcttcttccagatcgtccaaacgtttctgctcttcaagtgaacgctgtttgagcacattgtccatacccggaacgtctttgataccgaatcccgtagccagaatggtgaattttactttgttttccagcgtttcatcagtgtaaagaccccatttggtttctacgtccttgccaaacttgctcatgaattcatggatttcatccatttcacccatcatcagttcgctgttcgggctataggtaattacgaacaacactttcttggagttgaaaatatcgttgttgttcagcaacggggaatgaagggcatcggtaatagcctgtgtgactcttccttcgccttctccgtatcctgtactcatgattgctacaccaccgtccttcaacacggttttcacatcgttgaagtccaggttgatgatacctctcaaggtaatgatttctgcaatactctttgcggcgatagacagcgtgtcgtctgcctttccaaaggcattcattacactgatatcggaatatacatcgcgcaggcgttcgttgttgataaccagcagggcatctacatgcttactcatttcttctacaccatcaagagcctggtcgattttcttgttgccttcgaacaggaacggaatggtcacgatacctacggtcaggatttccatgtccttagccgttttggcaatgataggagccgcaccggttccggttccacctcccataccagccgtgatgaatgccatgcggcatccgtcgttcagcatattcttgatgtcttcgatgctttcttcagcagcagcacgtgccttggccggacggtttccggctcccagtccttcgctaccaagctgtagtttccggagcacgggtgattcttccagagcctggttatccgtgttgcagaccacaaatgtcacatcatggataccttctttgtacatgtgattgacggcattacctcctccgccacccacaccaattacttttattatatgtggagagtctttcgggaaatcgaaaggtaccattgtttcgtctgacataatcctaatatgtttatgtaaatgaataatcagttatcttttaatatttcatctgaaaggtttgtaactttcttggcaaagaggtcaaaccaactgttctcttttttctccttgttgattttcttctccagttcatccagttcttcctccttttcagcgaggtgcatgcgccgtgcattttctacttccttcaatgcagctttgtatttctttttgctgagaagtagatgtgcttcttctacgtatgcagtatattcttccagtcgtttacggttacgttcttcttcctgacgttttttctcttcattgattttgcggatgcgttcagcttcttcttccgctttgcgtctggcttcttccgcctgaatacgttcggcttctttgcgtttggcttcttcttccttttccttcaaatcttcaatgaagtcgagctggtgaccttttcgagggtctactttgagacagttttctttaccttcggccaataatccgatcagtgtgttctgtgtaccgtctttgggaatttcgatggcaccgttcagtgtaatgtttcctcctttggcaatacggattttttcaatcttggtaatctgtttgaatgcttcgtccatgttgggcatgttggaagccccaccggtaagaatcagtccggccagcaatttatcgccgtattcagataccatgatttgattccatacgttcgagatgatttcattcacacgagcttccacgatgtattccaatttgtgggctgcaatgctacatttcccttcgatgctgtattcctgttcatctgcggtttcgtcattttctgctggaggtgtcaatgcacatccgtagcggagtttcagctgttctgcatcttcttcttcgatttgcaggctgcaaatatctttggtaatgttattgcttcccaatggaatgactgccagatggcgcaggatgttgttcttatatactgccacagtcgttgtgtctgcacctaaatccacgagtgcacagccggagcgtttttcactgtcggtcagtaccacgctggcggtaacaaccggcgaaaggaaatagtctgctatttcgtatttggtctggttgaaacacttggtgattctgtctttgagcgtatggtgtgcgataatattcaaataacgcccctcaatgcggtcggctgaaataccgacaggttcagtcagcagattgtttcctactttgtattcttgtggttctacatccagaatctcctgatctatcagtgagatttcccggttgctttccataagtgattcaatcagtgcttgtgatatttttgtatcttcccctaattgcttggtcacattgttacgtgtgcttcgtatagactgtccgcctattcccacatagactttcttgatggaagcctgcaaatcttcttccagcttctggataacagaaaccagcacttgggtggttttatccagattgaagattgccccctttttgatacaatctgacgaaggagtattggcataggcaagaatctggatacttccatcagcattctttttgccggcaattcctgtgatgtgagtcgaacccagttcgatagctgctataaaatctgttactgccatatcttagtcttctttttttgttccgataatttgattgttaaactcaatactgattcgctcatatttgttccagccgatgcggttgagcactttgctgtaaaacgtttgcaatttactgaatttttcttcaaaatcagtggctttccctaaaaaaagaatatggtcgcctactcggggaacaatttccagttcttttttcggggttacgttgatctgttccacttgggctttccaaaacggattgcgctggaggtacaagcctaattcatataattcctgttgagcaaactttcggtcaataaaacccgtggcaacggctacatgaattggctttcctgtggcattcatgattttcccggaatggtcaatgtagtaattgtccccattgctgctcatgattcgtaagagagggatacgctggtagatttcaattcctactttccctcccgaagtgagatagcattcagctctgctgatgaaaggatgctgtgacagcacttcctctagctggcggacattgattgtgccaatacgctttttctccgggtatagattcttctgctttagtagtttggttacttctgcttcagtgatgaaaccgtagtcaacgctgtctttaacaaccaattccatacccttgcagacctgattttcgggcttgcgattgaatatggtaacggccactatgaggtaaatagagaccgctaccagaatgcagagtatgagaattcgtttaatcatctatcttttagtaattcataaatttgtggaacgtaattgtctatgtctccagctccaagcgtgatgagtacgtccagctttttatttttcagtacttccataatctgctctttggaacacatgcttttttctatgccggggcgtaagttatcatagataagctgactgcttactcctggtatcggagcctcccgggctggataaatatccaacagaatcacttcgtctaagagtgacaggctatgggcaaaatcctgatagaaatcgcgggtacgcgtgtaaagatgaggctggaacacggccgtgattttccggttaggatataatttgcgaatagagcttacactctgtcggatttcttccggatgatgtgcataatcactcagaaagacgatgtgtgaattctttatcttgaaatcaaaacgacggtccacccctctgaactgtggcattgcggcctttatttcttctgtggtggcacctccgatttgtgctaaagccatagcggcaataccgttttcaatattgacaaagacaggtactcctaactgcacgttggtgatgttgcctaaaggagatatgtagtcgaaataaatttcaccgtcgtcaatacggatgttttcggcatggaagtctcctttttcggtagagtaggtgtacacagtaactcccggctgtacatcgggtttcagttccagtccttccttgataatcaggtatccgtccggacggataagtgaggtgtacttacggaaactttccaggtaagcttcgtgcgtaccgtaaatgtccagatggtctgaatcggtggcggtaataaccgtagcatacggagtcagccaatggaatgaacggtcgaattcgtctgcttcgataactacatagtcacttttatctgataataacaggttggtctggtagttcttggaaatacctcctaaaaatgcattgcatcccacgtgtgaatggtccatcaggaaagctgccatggtagaggtggttgtttttccatgggtcccggctacacacattcctttctcagtctgagtcagcattcccaatacctgggcacgtttgtgaatctcaaactgatgttcctggaaataaaccaattctttgtggttggtagggatagcaggcgtatagaccaccagcgtggtttccggatgaagaaatacttccgggatgagagacacattttcttcataatggatgtctgctccttctgcaatcagtttctctgtcagctcgcttggagtgcggtcataaccgcctacttttttcccttttgacaggaaataacgtaccagagcactcatgcctatgcctccggctccaatgaaatagactgcctgtatggtattaatgttcatgattttctttgtattttaacgctagcttgcagacctcctttgcgatgatagtggcagagtccttgatagccagtttggtaatgttgttccttaattctttcaataaatcgggtttgtgaaccgtttcgatggcggtatccagcagtttttgagttgcttcgctatctttaatgtaaagtgccgcattcttgttgacaagtgccagtgcattttttgtctggtggtcttctgccacattgggagaaggtaccaggatgactggtttgcctaacagacagaattctgagatagaacctgcgcctgcacgactgattaccacatctgcagcgctataagcagcagccatatcggatatgaagtcggttacgtgcaacattggaagttccccgtaagcctttacagcttgttgggcttcattgatatagattttcccggtctgccagataaactgcactcctgattctttgattttgtcgaatccctgcatcatgcagttgttgattgtgcgtgctcccaagctgcctccgacaattagaatggtcttcttcttggggtctaatccgaacgagcggattgcttcttcacgtgatatgtttttgctcaacaacccttgtctgactgggtttcctgtcagaatgattttgtctttatcaaagaaccgttccattccttcgtatgccacgcagattttttctgctttttgagccaatagcttattggtgactccggcataagaattttgttcctgtatcagcgtgggaatacccatcatgcctgccattttcagggtaggaccactggcatagcctcctacgcctacagcagcatgaggcttgaaatcctttatgattttgcgggccatcagttgacttctgaacaatttgataagtacactgatgtttttcaataaatgctttctgtcaaatccagcgactggcaatccgataatcttgtaacctgcggcaggaacgcgttgcatttccattcgtccttctgctccgataaacaaaatctcagtgtccggatataattcctttatggcgttggcgatggaaacggcgggaaaaatatgtcctcccgtgccacctccacttactatgatgcgtaatttttcttccatattctaatgtgatttacctgcaaaggtaagaataaacttttaaacggatttctcctgtggtatgatattattttctggagcaatctcctgagattgttctgtctgttgtgcgagcaattcttctgcctgctgacgtttcaagtcgtttacgtatcggctgatactcagaatcattccaatgtaaacacagttgacgagggttgatgtacctcctttactgataagtggcaaaggctgtccggtgactggcatgattcctacggctaccagcatattaaacgtggcctgcaacacaagcagaatcccaatgcctgtaaccagaaatatgtaatatgacttgtcacagtttctggctattttggcaattctcatcagaagcaggatgtaaagaatggctacgaaagctcctcctacaagtcccaactcttcgatgatgatggcatagataaagtcggaaaaagcttgtgacaggaaatctcgttgtacactgtttcccgggccttttcctaaaatgtggctacttgctatggcaatattggcatgggctatctgtgcatcattgtcgatgtcgaatttggctgccggtatttcactctcgtcaaaatgattgttcaagcggctttgccaggttaccatacgatgaagcccgattttatcccaggcttctccaggaatatatttgatggttcctacaccaatgatgatgcaggcaaaaccgatacctgcaagtaatccgagctgcttgaagggaactcttcctacaaacatgagaagaaaaacacttcctgccaacaaaactgccgtagaaaggttttcagtcacaatgagtccgcaagttgcagccgtaatgccgcatatatacttgaaagcttttttgttggctccattttcttcctgcatgcgcgaaagaatgaatgcgacggtgatgatggttgccattttggcaacttctgagggctggaactgaatgaaacctaaatcaatccatcgtttggctccattggtaagggcaccaatcacgaatacggctatcagtaatgcccatgatataggtagtaaagcgataaaagtcttaaaccagcgacagggaatattatgcacaatccatacagcgatagtaccaaccatcagcaaggtcagatggttggtaatcggtccccagtggtctccacttttataggtaagcgtactggatgcactgaatacctctacaatggatatcaggcagagaaacaggtaaataatccagatcgctttatcccctttaaaaaagttttttagcaaatccatgtgctatgattctaactttttaatgatgcttataggtttcttacacactctttaaactggtcgcctcggtcctcataacttttaaacaggtcaaagcttgcgcagcacggactcagcaacacggtttctcctttttttgccatgttgtaggctgcgtttacggcatcaggcatgctttgtgcgtctacaatcggaagaccaaagttgccgaaaaagtcgtgcagcttttcgttatggagtcccaagaatatcagtccgctacatttctcttttacaaggtcggcaatctcattgtagtcatttcctttgtcttttcctcccaaaatcaaaactgttttggttttcatgctttgaagtgcataccagcaagagttgacgttcgtagcttttgagtcgttgatataatccactccttttacgcgtgctaccttttccagtctgtgctctacgcctttgaagtcattcagtgcttcgcggatgcattctttgcgaatacctgcaatgttagcagaaataccggcagccatggagttgaagaggttgtgagttccagtcaaagctaattcttcctgttccatgttgaatgcgataggacgggtgaagtacaccttgttttcttcggtaaaggcggcgactccctcttcgttcttttcagcgaatgggaagtattgtccgtgaataccatatttatgaagttccttctgtatgatggggtcgtcgttccagaaaatgaaggcatcatcatccgtttggttctggataatacggaatttggcatctacgtaattctgcatttcgaatccgtaacggtccagatggtctggagtgatgttcatcagcacggcgatattggcatggaacttatacatgttgtcgagctggaagctgctgagttcaatgacataatagtcataattacattcagccacctgataagccagactttgcccgatattgcctgccagtcccacattcaggcctgctttcttgaagatgtgataaatcagtgaggttgtagtcgttttaccattgctgcctgtgatacaaatcattttggcattggtatatcggcctgcaaattcaatctccgaaatgatgggagtaccctgattctttaatttcagaatgataggagcatcattgggaattcccgggcttttaatcacttcatccgcattcagaatcaactcttctgtgtgtttaccttcttcccattgaatacctctttcgttcaacattgctttgtacttgtccttgatgagggacatgtctgatacaaatgtgtcaaatccttttttctgtgccaggacagcggcaccagctccgctttctcctgctcctaagatgacaattcttgccattgctttatctgattttaagtgtgattatcgtaattgctgctaatacaatggttacaatccagaagcggactgtaatcttggactcatggaatacgctgtgagggcgtgtgatcaaataagtacagttcgggtcgagctgtgccagtgtcgtacggaaatggtcgtgaatcggtgaacgcttgaatatgcgctgtttgactccttttttcttaccgcgctggaaatactttacctgaagaataaccgacaggttctcgaccagaaatactccacatagaataggaattaataactccttgtgtatgatgatggcaaatacggcgataagtcctccaatagtaagacttcccgtatcgcccatgaatacttgtgcagggaaggcattgtaccataagaaaccaaccagtgctccaatgaaggcacagataaagattaccagttcctcacttcctggaatatacatgatattcaggtattctgcatattctatgtgactggatacgtaggccaatattcctaaggtaactccaataatggccgagttcccggctgccattccatccataccatcgttcaggttggctccgttggaaacggctgtgaccacaaaaatagtgatgaatacaaagacaatccatccggcatcctgtgcatgctctcctaagaatcctacaaaatcagcataatccaagttgttgttcttgaagaaggggattgttgtcttggttgatttctcatccacaggtttatggaccacgtcaactacacgaccgttttgttggatttcaatgttctctcgtattactacatccggactcaggtacagagccaggccgacaatcagtccgagacctacctggccgatgattttaaatttgccatgaagtccttccttgtctttccgaaaaaccttgatatagtcatccaaaaagcctaaagttccgagccatagggtggtaaccagcatcaatatcatatagatgttatgcaatttacctaataacaggcaaggaatcagaatggctacgatgataatgatacctcccattgtcgggacaccaaccttattgacgttaaaagggtcaatagacgcatctcgctgcgtctctgtaatctgcttctttttgagcaggttaatgaaatattctccaaagatggcagaaatcaacaaggagaggatgacagccattaatgaacggaacgatacgtatccgaacattcgtgctcccggaaaattgaattgctctaaatattgaaataaataatataacattgtcttgtctctgttttttaaagttctcctttgaatatttcctccaatacctctttgtcgtcaaaatgtgatttgacaccctttacatcctgataagtttcgtgtccttttccggcaatcaggatgacatcttgcggttgggccaacatacatgcggtacggatagcttctttgcggtcgacaatgctgataacttttttcatgtcgtccttgctaagtcccgctaacatgtcattgatgatgtcttgcggctcctcgaagcgtggattatcagaagtgataattactttgtcacttctttgagcagattcttttgccattaaaggacgtttccctttgtcacgatttcctcccgcacctactactgtaatgacttgtcctcttcctcttaacacttcatgaatggcttccaatacgtttactaaagcatcgggtgtatgtgcatagtcaacgatggctgtatagcctttgggagaacgtttggcatcgaagcgtccggaaacagggcgaagcatactcagttttaccaatatatcttccgggcgtttccctaacaggcaagctgctccatatacagccagcaggttggatgcattgaagcgtccgataaattgcacgttaacttcgcggttattaatgtcaagcaacattccgtcaaaactgtcttccagtactttgcctttgaagtcacaaagagaatgtaatgaataggcagccactttggctttggtgttttgcgtcatgaccgtaccgttcttgtcatctaggttagtcagtgcaaaagcttgtttcggaagattgtcaaagaatgctttctttgctttcagataattttcaaatgtcttgtggtaatccaggtgatcacgggtaatgttcgtgaaaatgccaccggcaaaagtcagaccactgatacgtttctgtacaacagaatgtgaactgacttccatgaatacatatttgcatccttcatcagccatacgtcccagcaactgattcagtgtaatcgggtctggagtagtatggtcagtagggatggcctctccgtcaatgtaattgcacactgtagagattaatccggccttatatccaaacaagcggaacatattatataataaggtagcgatggtcgtttttccgttagtaccagttactcctactaattccaatttggaagtcgggtctccatagaatgtagtagcaagtttgccaacagcttcttctgtgtctgacaattgtacataagtcacattagattctatgtgtacaggcagttgttcacaaacaattactgtggctccattctcaatggctttggaaatatagttatgtccgtcagcttgcgttccttttacggctacaaacatgaatccgtttttcaccatgcgagaatccatgtgaataccatttacctccaggttggtatctcctatgatttgctgtgcgttgacagcttttagcatattctcaagtttcattgctttctagtttaatgttaatgttattgtttgtcctttatgtaaataagagcctgcattcaggctttgtctgattacctttcctgtaccagataagcgtacacggagtcctttgctttccaataaatagactgcgtcctttgctcccatacctcttacgttaggtactaaattcttttccgtatttgttcgcttcagttctgcataagtcgttgtgcagttcgctttgccccagataggagtactgcttttcggtatgcttgaactattactctgaatattcagattctgtaatacataagatgcttcgcgcaagtctccattctttacttcaggaataataattgaagttgagtcttttgctgaggctaaatcctgatacagatgcttagcataaatacgttcagcaatccggctgaatacgctaccagcttgcaaacctcctgatgcaggaccatgcggtatctgaatggataccatacaactgtatttaggcgcttcagatgggaaatagccgcagaagctgactaagtaacttactcctccagctttgtatccagctttcccttgagaaacctgggcggtacctgtttttccggatacactaaactgcttacttccggcaggcttggccagtccttgagaaaccacctttcgtagaatcccttgaatcatggtcagagtagtgtccgaacagattttaggatttacaatctctgtcgggaattcttgtatgatttctccatcttttgcgatagcctttacaaacttaggcttgaccatgactccgttattggctatggcattgtaaaaattcagcatatagataggaggaatcatcgtttcgtatccgatactcatccaaggcaaagaggtcttggcgaagtatcgttctttaggccccaatatacgaggacttgcttctcctacgaaacctaaatttaaaggtttgtcaatgctcatgcgtttcagcccatctataaatttctgtggattgtctccgtaaaatttgtcaatgatgcttgacacgccgacactggatgacacttccatgattctggttacatctatttttccatatccgcctttataccagttccagtccttcatgttgcttccgtgcatattgaccacaccattgcccgtgtctaccatgtagtcaggggtgataaatttatcttccagtgcgaccatgattgaagccgtcttgaaggtagaacccggttccatcaagttacttacggcgatatttcgcatttcataatagttcccgtcacctgctcgggtcatgtttacgttagcttttacttctccagttgctacatccatgacaatggctacaccaaataccgcttcaagattctttagctggtctacaagagccttttcggcaatatcctgcatgtcgacgtctattgtggtaattatatcacaaccgtctacggcaggtttgtcgatgatgttcagatatttgttcatgactttctgacggtgagtaataccatcctgtcctttcaagatagaatcgtacgtcaactctattccgttctttgctcccaatgttacatccggatacatatcgcctaacgtacgtgccgccaatgaaccgaatggctttttgcgctggttgaaagccagttcatgaaatcctcctttaaatttacttaagttgaatacgggcaatttcttggcttctttgtattcaatgtaagaaatacgtcgtggatagagaagatagttccgactcttctgccgtctgcctttcaagatgtgctggcgaaattcctttgcacttttatcaggaaagatttgatgaagcccttcgcatatttccgtcaggtggttcatcagcatggtgtcttttgtttctccacctgccttgaaatccatgtaaatcttatattccggcagactgctggccatcagtttcccatctgcagagatgatattacctctggtgggatggacaatcacattctctttgatgaaacggtcggccacatccttccagtattgtcgctcagcaaacatgataattgctgcttttgcaataattgcaatagccagcaatgccatgatgagcataatgagcgtatatcgtaatatgatatttttttgtcctggtaccattttaatccttgttttttattagatagggtggtgtggaagctgtttccagtggagtcccttctgcagaaatatactcttcaatgcgcgactggcggcttttctctgtcagttcagaggaaatagtcagtgcgtcatatttggtgtcgattaattcctttttcaagcggtctatttcaatcatttcctgctgactggaatagcggttgtctatgtacaggatgacaagaatcataatcagtatgattaagttagcctgttttctcatcaggtgtaccagtacttcccctcctaatatgcttctccaggtaatatgtggagaatcttgtggtgtcatttcttggtgttccatgtgttacttcttttctgcgattctcagtttggcgctgcgtgaacgtgggttacgctgtatttcgtcctcgctggggatgataaccttgttgttgattaacttgaatggagtttctacgttcccgaaaaagtcctgtttcgcttttccttcaatgttgcccgttttcatgatgtttttcaccatgcggtcttccagtgaatgataggtaatgactaccagtcttcctccgggcttgagagcttccgttgcagcataaagcatttctttcagcgcttccatttcttggtttacttctattcgaagtgcctgaaaaatttttgctaattctttcttttctctttctcttccgtaaagtggttttacaatctcaatgaattcccctatagtctccactggcttttgtgctctggcctttacaagtgtggcagccagtttacgactgtttttcaactctccgtaaagataaaacaagtcagctagcttttcctcctcatacgtattgacaatatcggcggcggtaatgcctgcacgtttgttcattcgcatgtccagtttcccgtcaaaacggaaagaaaaaccgcgttcagagtcatcaaaatggtgagatgaaacacctaaatcggctaagatggcgtctacttcttctactccgtaatagcgaaggaaattgtgcaggtagcgaaaattacttctgacaaaagtaaaacgtttgtcgttgataatatttctttccgcatcggcatcctgatcaaagctgaacagccggctcttactgtccatgttccgtaatatttctctggaatgtcctcctcctccgaatgtgacgtccacgtaagtgcctccaggctgaagatgcatgccttcaatactctcgtgtaatagtaccggtatatgatatgtagactctgttttctccatgcgattttcttgtaaattcaccttattatatattcaagcggtaaaattagaaatttccatagaatcacgcatcatgttttctatagaaaatttgaataagttatcaacaggttattctttctgtgcaaaacaaggaagaaacgtcaaagatttgtcttaatgaaattagttctgcaattttttttgtctgtataagtgtattttttgtcataaaatgagtgtcttttcaaaagatgagttacttttgcaaagtaaacttttgtagaatgggtgaaaattcaatatttttaattgacattgacaaagtattgagagacaaagcagggaaaaaggctgaccgcataccgcgttttttagtgtcatacttaaagcatattgtgcatcaggacgaaattaatgtgttcctgaaaagtgttgccgacaagaccggtgtggattttctggaggcttgcatggaattccttgacattaagctggaagtgaaagggatagagaatcttccctccgatggcttatgcacgtttgtgtctaatcatcctttaggaggacaggatggtatcgccttaggctatatattgggcaagcattataatggtcgcataaaataccttgtaaatgatttgctgatgaatctccatgggttagctccattgtgtattcctattaataagactggatcccagtcgcgcgatttccccaagatggtagaggctggattccgctctgattctcatattattatgttcccggctggcatctgttccagaagacaaaaaggagtgataaaagatttagcctggaagaaaacctttatctctaaaagtgtggaaacacaacggaatgttatcccggtgcatttcgaaggaagaaactctgattttttctacaacttagccaatctgtgtaaatttttagggattaagtttaatatagccatgctttatctagctgatgaaatgtttaaaaaccgtcataagacctttaaggtaacaattggcaaaccgattccatggcagacgtttgataaatcacgttcggcaacggaatgggcggactatgtaagagagttagtttataaactgtgaaaagaaaatacgatttaatcattggattatggaagatataattgctccgattgacaagaaagttttaaaatcggaactaacggaagacaagcgcttaagatttacgaacaagagcaacaacgagatttacattgttacatggaagaatgcgcctaatgtgttgaaggaaattgggcgtttgcgtgaaattgcattccgtgccgctggagggggaaccggtaagtcaatggatcttgatgaatatgacttgatggaaaatccttatcagcaattgattgtatgggatcctgaagctgaagaaatcctgggtggctaccgttatttgttaggagatgaagtggagtttgatgccgagggtaagcctttgctggcaacagctcacatgttcaatttctccgagaaattcctgaaagactatttgcctaccacgatagaattaggacgctctttcgtgacacttgaataccagtctactcgagcaggttcaaaaggactgtttgccttggataatttgtgggacggtctaggagcgttgacggtcgtcatgccgcaggtaaaatatttctttggaaagatgaccatgtatcccagctataaccgcttcggacgtgatatgattctttatttcctgaagaaacatttcaatgataaagataagttgattaccccgatgcagcctttgctgattgaaaccgatgaaaaggtacttgagaagctgttctgccacgatacctttaaggaagattataaggtgttgaatacagaggtgcgcaagttgggatataacattccacctttggtgaatgcctatatgagcttgtcaccgaccatgcgtatgttcggtacggcgattaatgatggctttggtgatgtggaagaaaccggtatcttgattgccgtggatgagattcttgaagaaaagcgtgtgcgtcacatcgaatcctatctgcgtgaacatccggaggctctgcagataacttctggagccaatccggtggtaaataaaacgcggaaataataatattctttatagagcaggcaggctgttcccgtttatttttcggtataggtcaagtgcatagacatctgtcataccggaaatataatcgagtacagcctgaattttttcatataaggtaggagcctggatatgatattggctggacactcggttgattaacaactgggaatacgccttttccgggtatcttacggcttcaatcattaagtcgaccagcgtggtgattacctgataaccggccagttcgatgtcgactacatctttcgagcaataaattttttcaaaagccgtatgtgagcagttctcataagcttctctgactcttgaactgagcttctgaatcagcgttccttgaaattcaccttttagaatttcctcttcgtgcagaataaaggtgtgtacacattcactgattaatactccgatggccgatgaacgcaggtaggctatttgttcgttggtgtcgtccaccattttgcatatcgattgaatatggtctaacttctcgggggcaaagaaacgtaaatacaattctttggtctcctgtgtggtcaatatttttagtttatgcgcatcttctatgtccatcatctggtagcagatgtcatctgccgcttctacaagatacaccagcggatggcggcaatacttcaatggctctccttccttgctaatctttttaagtcccagttcatgagctatcttttgaaaagcctcttcttcgctggtaaaaaatccgaatttctgtttgcttccggccagttgcgaggaaaaaggatatttcacgatggcagccagcgtggcatacgtcagtacaaaaccgccggggcgtcgtccctgaaactgatgggtgagcaagcggaatgcgttggcatttccttcgaagtgagtgaagtcatcccattcctttgctgaaagatatgcttgtaaggtccgtccttttccttcggaaaaatacgtgccgatggccttttctcccgaatgaccgaaaggaggatttcccaagtcatgcgccaggcaggcggccgatacaatggagcctatttctgaaatatgcgtatcatgcagttccggatgaagctttaatagctcggatgcgattttattgccgagcgaacgccctacgcatgaaacttccaggctgtgtgtcagtcggttgtgtacgaagatacttcccggtaaaggaaagacttgtgtcttgttttgcaaacgccggaaaggagctgagaatatcaggcggtcatagtcacgttggaactctgtacggtcttcttttcgggcttcatgaagattctccagaccgaatcttttatttgatagcaattgtttccagttcataatgtaactcctttgtgatgtggtacttaaatttaaagaagctctaaaagttaagtgcaaaaatataaaaaaatggtaaacgtaactattaattctgtggattgtgtaacttcgcaacttcataaaagcataaaatagatgaaaatacagattataaatacttcccggcatccgttgccgcaatatgctactccacagtcggctggagtagatcttcgtgcgaacctgaatgaaccgattgtgttgaagcctttgcagcgttgtctggtacccaccggattgtttttggcgttgccacaggggtatgaggctcaggtgcgtccgcgtagtggactggctatcaaaaaaggtattaccgtattgaattctccgggaaccattgatgccgattatcggggagaaatcaatgtgatattagtcaacttatcagctgaagagtttgtgattgaagatggtgaacgtatagcacagatggtgatagctcgtcatgaacaggctgaatgggaagaagtggaagtgttggacgaaacggagcgtggggcaggaggatttggtcacacaggaaccgtataaacctgaatgtatgaaaaaactattaggaatcatcgggatggttttcctgctgtttgcctgtggtaccaccggaaagcagcattcggcaaagcaaaacttggcaaatgaggaaagggataccttgtcatacgaacagcgcaggaagtataattacttttttctggaggcagttcgcctgaagcagaagggagagtatgatgctgcgtttgaactttataagcactgtctggatatttatccgggttccgctccagctttatatgagatttcccagttctatatggtcttgggccaggaacagaaaggcgaagaagcgctgaagaaagcagtacgttcggatgaatcaaatttctggtataaacagactttggcggcttattaccagcggaagcgtgattgggcgaaagccattgccgtgtatgacgacatggcacatcagttcccgtcccgattggaaccgctgatggcattggtcgatttgtataatcagacaaaaagctacgcacaggtagtttctgtgttgaaccgtctggaagaactggatggaaagtctgagcaaatcagtatggagaagttcagaatgtacctgctgatggataatcaggaacaggcgtttaatgaaattgaaagtctgtcgaaagagtatccgtatgatttacgctatcaaacgattttaggcgatgtgtacctgaataacgacaagcccgaggaggcttatgcggtttaccagcggattttaaaggaagaaccgggatatgcaccggctttgctatcaatggcttcttattataaacagttgggtaaggacagcctgtatcatcagcaattggataccattctgttgaatgaggatgtggagtcgaacactaagatggaaatcatgcgtcagcttatccttcagtcggaacagaccacgaaggacagtacacagattgtatccttgttcaaggaaatcttggaccgtccgcagcaaaatgccgatttggccatgctttgtgcacaatacatgattacaaagcacatggaaaaagagtctatacctgtactgaatcaggttctgtcgctcgatccggaaaacaagcctgcacgcttacagttgctcagctatgctattcgtgacaataacctcgatgaagtgattcgtgtggctactcctgcgctggaatacaatcccgatgccatggagttctactattatttaggcttggctcattatcagaaagaagaaacggataaggctatggagattttccagcaagggctgaagcaggtaaatgaaaagagtgataaaggaattgtctcagatttttatgccattttaggagatttgtaccattctaaggaaatgaaagcagaagcttatgcagcctatgattcttcattggtttataatccgaacaacatcggtacgctcaacaactatgcttactatctgtctgtagaacggaccaatctggataaagccgaggaaatgagttacaagaccgtaaaggcagaacctgagaatgcgacttatctggatacttacgcctggattctgtttgagaagaaacgctataccgaagctcgtatttatatcgaacaggccatgaagaacggaggagacagcagtcaggtgattgtggaacattgcggtgacatttattatatgtcaggcgaaaaggaaaaagcgctggaatactggaaaaaggcggatagcatggagaataaggaagaagacggagctactccgcgtacagaagctgaattgaagcgcttgaaacgtaaaatcgcattgaaaaaatacatagaatgaaacggtttatttactgggtatatgtggtgtgcctgattgtattggcctcttcttgtcgttctctgcgtcatgcagaacgcgccccgatgattggtggactgaaaggagaagagtatcaggaaaaggtaatttccggtcttcctcactggaattgtgtgacaggaaaggtcgctttgaacctgaatgtagacggggggaagaatacgaaattatcggctacgctccgaatgaagaaaggagaagtcatacaattgtcggtggctcctttgctgggcattgaagtggcacgtctggaaatttctccagaccgtattttagccgtcgaccgccttcacaagcagtatgtggaagtttcttttgatgagttgaaccggatggccgatctgaatctgagctttaatgtgctgcagtctttgtttctgaacgaaatctttttgccgggtaaggaaaccgttgaggtgtccgatttgcatcgtttccggatgacatcagaaggagaccgtgctctgtgggaagtaaaagatacccgaaaactggcctaccgtttccggactacggccgataaaggatggcttgaaaacacttctgtggccctgtctggcactccgtatgcattaagctggacgtatggagattttgggaaattaggtacggcttatttccctcagtatatattggcagagttgcaggggactggaaaaacttatagtctggacatgaagctttcccgtatgtcggtgggagaagactgggagacgcggacaagcctgtcctccagatataagaaaatagaattaacaaccttgctcaaaatgtggttggaaagatgaaacgttttgtagtcatatcttgtatttgcttttgcgtttgtacgcttgctgctcaaactactccgaagattcgtcaactggaaaaacagcgtaatgagctgaaacaacagattgccgaatcggaaaccttgttgcagtctaccaagaaggatgtgaaaagtcagctgggaaacctggctttactttcagggcaaatagaggaacgacaaaaatacattcagaccatagaaaatgatgtaaaggccattcagcaggagattagccgtctggagcgagatttaaagagtctgcagaaagaactgaaagaaaagcggcaaaaatatgaattatctgtaaaatacatttatcggaataagtctatacaagacaagctgatgtttattttctcagccgaagatttcgggcaaatgtaccggcgtttgcggtatgtgcgtgaatatgccgattatcagcgtttgcaaggcattcaggtacagcggaagcaaaagcaagttaccgaaaaggccaattctttgaaaaacagccggaaggcgaaggaagacttgctcaagcagggagaagcggagaaggctaagctggaagcacaggagcaggaacgcaagcagattttgtcaggcttgcaaaagaaacagcggagcattcagtcggaactggctaaacagcgtcgttcagcggataaactgaatgcgcaaattgaccgtctgatagaaattgaaatcgaaaaagctcgtaagcgtgcggaagaggaagctcgccgtaaagccgaagaggctcgtaagaaagcggaagctgcaaagggcagtaccgaaacatcatcgtcggctaaaaaagagacagcgaagacttctgtcgagaagttagaagcttataaggtggattcggaagaccgtcgcttgtcaagtaactttgagaaaaataaaggaatcctcccagtgccaattaccggaccatacgtggtggtaggacattatggacagtatcaggtgaaaggacttcgtaatgtgaagctggacaataagggaatggatattaaaggaaagtcgggtgccaatgcccgtgctatctttgacggtgaagtttcggctgtcttccaatataatggcctgaccaatgtgctggtacgtcatggaagctatatctccgtttattgtaacctgtctacagtgcgtgtcaagaaaggcagtctggtacgtgcccgtgatgtgttgggagaaatccataccaatgcagaaggagaaacgattttgcatttccagttgcgtaaggaaacggtgaaactgaatccggaactttggatacatcgttaacaatcgtgcggatatagaatggggagtcctggttttattagccaggactttttagtgtataaactcttcaatatagggatatgatggcgcatttcctatatgtgtacttacataaaaaggaaaattttagtgcaaattctctgtttcacactgtgaaatataaaaaccacactgtgggatacatatttcacactgtgagatacaaataccacagtgtgaaacagagaatttatcagagcgttgtgaggaatgtactaaggcaactttgattagggctgattgagttatggctttaaaccatagtgaatgaaaattactatacttcactgtaataactttaatacttttatcgtggtgttccggtttcttaaaagatatatttatttttatattgaattcacgttattttctatgtatttttgtaataaagttatgagttgcatagtagtaagacaatagtttgatgaagaatcattattttcagatggatgacagagcattgtggtcagagttgcgtagtggtagtctgattgctttggaggttatatatagaagatactattcattgcttctcaattatgggatgaaatgtactcctgatgatgatatggttcgcgattgtattcaggagctgtttgtgaagctggctaagagttcaaatctttcggatacggaatatcctcgctcttatcttctgaagtcgttgcgcaatatgattaatgataagtctacttcagcaaggtctcaggtagaatgtttctcatttaatgatgagattttttcggatattatggatgatgattcttttgaaaagatttttggaaacagtgatgaggatcttcggaagaagaaggcacttgtccaggcactttctcaacttacctctcaacaaaagcatatcctttatcttcggtatataaaggggctatctcataaggaagtagctgaggctatggatatgaatgtacaatcttcaatgaatctattgtctcgtagcgtttcaaaacttcgtgagattcttgcaactcattcgataatgtgtatcacattccttcagtggatgcaaattattttaaaatagtttcttgattatagactccgatatatattttgatgaatatatatcggattttttttctttttatattatcctgaaagacattgtgttataaaaaatcgcataaaaaagtcattaaaagtgagtaggtttttgttatattatcgtattaaagataaaaggcagaaataatgagtagagaaaacaatatatcatactttaggaaattaatttattattttaaatcgtgtgaggtatcaccaacggttgatgaagaagacagattgtggaataatataatgtctgaaatcagtgcttctagacgtcggagaagatatgagctaaatagatggcgtatctccttaatttctttaggagtagctgcaatgctttcaggaatagtctggatacttcaggataataacagaaatgagttgcactctctttatgtagcctatcaggcaatggatgtcagtacgcatataaagagtgacaaggtgaagattctgactggtgaacaagaactggtttctgtagataatggtgcgagaatagattatacaaaatctgatgagaaacttgttttaggagatagggaagttgcgatgcctgatgatgcagcatatcaccagcttgtggttccgaatgctaaacatgcatctttagttttgtcagatggctctgttctctatgtgaatgcaggtacacgcgtggtttatcctgataaattcaagaaagactatagggagatttttgtggatggtgaagtctatatagatgtggtaaaaaatgaaaaggctcctttcaaggttcatactacctcttgtgatatagaggttttaggtacgtcttttaatgttcaggcatatagtagtgataccaatgcggaggttgtattacttcgcggttctgtgaaacttaaggataaacatgaggaagagttgctgttgcagcctgatgaactggctgtgataatgggcagtagcataaaagagaagaagcatgttaatgcttcagactatatattgtggacgaaaggtcttcttaaacttgatgccacacctctttctgctgtatttaaacggttggaaagatattatggagttaaattagcatatcctgaagaaatggagagcatgaatttatatggtagtcttgatttgcaatgctcacttgaagaagtacttcgccgtataagtttgacagctcctatttcttttcaaaagatggataacgagataaagatacatataaacaacgtgcataaaaataactgacttgtgaatcaagaaatataagtcggataaatattaacccaataaaatctgtatactatggttttaatgaattattactcaacttaagaaaagtcattgtctttttttatttgaaaaaagatgtatgaagaagatttttaaccttttaatttaataacaaacatggaaagcaacaaaaagattttcaggagtaatagtataagaacactatgtactctacctttatttttactgcctatagcagaaatgaatggaactacaacttatgctcagtcagtgcagtttagttttagtttatctaattcaactgtaaaagaagtgttggagcagatagaaaatgaaagtgaattcgtttttgtatattatgaaaacacatttgatccttcaaagaaagttagtataaatgcaaacggaaaagaagtcgatgaaattcttgatgaagtatttgccggacaaggggtcagctatgaaataaacgaccgtcaggttatcttgaaaaaagaagaggctacaagtacatcctctaaagctgtacatcaacaggagacaaagaagattcaaggacttgttaaagatatttttggagaacctattattggtgcttctgttgtgataaaaggcacaactaatggaacaataacaggacttgatggtgagttctctttgaataatgttgaaaaaggttctgttattcaagtaagctttattggatatcaaactcaggaaatagcgtggaatggccagcctctgacattgactctgaaagaagattctcgtcaattggaagaggttattgttgtgggatttggtactcaaaagaaggaaaatctgacaggatctgtttctcaggttagcatggatgaggttttaggtgatcgaccagtaacgagcgcagctgcagcattgcaaggagcaatgcctgggttaacaattggtggtggttctggaccagggcagtctaaatctttcaatattcgtggaacattgtcaatcaatggaggatctcctctggtactgatagacaatgtagaaggagatataaatatgttgaatcctgaggatatagaaagtgtaacggtgctaaaggatgcggcttcatctgcgatttatggagcacgtgctgctggaggtgttgttttggtgacaactaagcgccccaaatctggcactaatttcaatttgaattataattttaatgtaggctgggagaagcctatcaatgtattggagcaggcaagccttcttgaatatattgatgcgtaccaggaggctggttatactcagacttattgggctggtaacggtgatgtagcaaaatggagagattatctggttcaatataaaaaagatccttcttcattaaatactataggagatggtatatataaagatactgatggaagggtatattggttaagtgaaaagaatatatatgataatattctgacaaccggttttttaaacaatcataatatttctgcttctggtggtacagataaaataagatttcgtctttctgcaggtttaagtaaagaaaacggacctttgtatacagacaaagacagttactatagaaagaatattagtgcttttgtttctgcagatgtgttgaagtggtttacacaagagataaccgtttcatattctgatgcaaagaaaaaaatgccagaaagggtcggtaatatggtagacttctattctacaagacttgtacaatattatcctgaagggaatatgcctgctgaaataattggaacagatgaagaactgcctactcaaactccaatgaacatgattaggtatgctccggtatcaactacaagaaccgcgattccacgtatttcaacacgttctatttttaaaattctgccgggctggtctgtaacagctgaatatacatttgatagaaaagatgtaaattatgatttttattcaggatcgtttaaatatgcagactgtcaattggctgttaaaaactcaatagaagctggtcaggattattataaactgcaagatgaacaaacaagatataatgcttttaacttgtattctaattttgaaaagaaatggggcaagcatggctttaaagcaatggttggctttaatcaggaaagctcatattataagctttttatgggacaggtaaaaggtcagacagctccatctgtaccttcgtttgaaggtggtagtggtgaaaaattattacaggatagctattcagagtacgcaattcgtagtggctttgcgaggttgaattattcatttaatgatagatatcttttggagttaaacggcagatatgatggctcatcaaaatttcctaagaattcacgttttggattttttccatctgtatctttaggctggagaatggggcaggaaaaatttatgaactggtcgaaaagctggctggatgattttaaactccgggcatcatatggttcaataggtaatcagagcatagatccatatagttatacaccagctatgaatgttggtttagatacagtttggctggatggaaacgataaagttagtgtcatatctttgccgggattagtaagtagtacatttacttgggaaactgtaaactcttttaatgtaggatttgatgttagtgcatttaataataggttacaggttgtatttgactggtttaaaagaaagacaactggaatgttgtctgaaggaatagaaataccctctgttgtaggcgctggtgcacctttgcaaaatattgcagacttatcaagtaaaggatgggaaattaatctttcatggagagacagaatcggaaatttctcgtataatatcggctttaatatttatgatagcagagcctttattgataagttcaataatgagtcaggttttgtggatagtaattatgtaggaaaggaactaggtgaatattgggggtatgtatctgacggatactatacaattgatgattttgtattggaagatgcccagaaaggtgtatggactttaaaagataatgtagtatcaattcaaggagtagtacctcaacccggtgatgaaaaatttaaggatttggatggtgataatataatttcaccggcaagtagtactttgagtgattcgggtgacagaaaagttataggaagcaagacgccgcgttatcagtttggagcaaatattggagttggttacaaaggacttagtctggatgtgagacttcaaggtgttggtaagagagattatgtcttaggtggggcagcattattcccgtttgctgggtcttcagcttcggatgcggtgttccagcctttattctacaatcagacagattattggtctgcagttagctatgatcctaatgatcctgattttatgaaggcaaagaatccaaatgcgaaattattccgtatatatgatcaaggcaataatgtgacttctaatacaagagcaagtgacaaatatatacagaatgcagcatatttaagagttaaaaatatcactttggcatatagcttccctaaaaactgggtacaaaaggcctttatgaaagatgcaaagatatatttaagtatagagaatcctttcaccttttcttctttgccaaagggatatgacccagaaggtaatgaatataatgagattgtatggaattatccatattataggacaatttcattaggtgccaatattacattttaatcaatttttaagacgattattaatatgaaaaagatattattagcaggagttttaggtattggacttttttcagcatgtaatgataattatctggaaaaatatccgcttacatcattgacggaacaaaatgcttttttggactatagcaactataaagcttacatgtatccgtgttacgaactatttaccaatacaacaattcaaactaattttaaggagaacagcttaaactcgcaaagatatggagattggtatgctggtcttgtgacaattcgtgataatgaatttaatccgtatgcataccagaccattactcaaacaacttcaggaggaggttgggatttttcatatattagacgcataaatattatgcttagccatttgggggatggagtgttaaatcagaaagaggcggctcattggcgatctgtaggtttctttttttctgcttggtggtatatggaattaatagatcgatttggtgatgttccttgggttaatacagtattgaatgaaacttctcctgaaatgtatgcagaaagaacgccaagagctgaagttgcagatagtattattgccagattggagtatgctgctgaaaatttaggtgattttaatgatggagataatactatcactgtcgatgttataaaagctgcattgtcaagattcttacttcgtgaagggacatgggcaaaatatcatggactggatgaaccttatgaagaatatttgagaaaatgtttggctgtatcacaggaactgatgaccaagtatccaacgttatattatggtggcggtactgagtctgaagatgctgctggatatggagaattatggactactgagaacttgaataatattccaggggtcattttctataagcaatatttggatggacttcttatgcatcgaggaaatgattttgaacatattgcggcacatagtgtggatgtaccacagtatactgtcgatatgtttttgatgaaaaacggatatccaatcaataatccaaattcgggatataaaggaggaaaaggtaaagatatgtgggatacttttgaaagtagagatccaagattgtatcagaatattcagcctccatacgttgtcgctgctaatactacaggagcttcagattatgtcactacattcccaacatggcagttcttaaaagaaggtgatataaatgaaaggcataccgttacggcagatgaagctgtaaaatacagaaaatacattgattacatgggaatcaatgataagtgtttaagaggtggaagttttggcggtcaaggaatgaaaagatgcccaggacaaaattggggggcatcattaactccaagcagtcctaatcttacgactgattcacgtgtggcatatatgtgttcaagaactggctattatacatggaaacattatgatatgtgggagttttcgacgggatctagtgcatattgtacatcagataagccgatatttaaaatagaagaaattcttttgaattatgcggaagctgcttgggagcttggattatttgatcaaacagttgctgataaaacaataaatttgcttcgtgatagagctggtgtgtcacctatgaatgtttcaatgattacttcagattttgatcctatgagagataaaggaaatgctccttggtggacaggtaaaggtggtaaatttggaaattatgaagtggatccagttttatgggaaataaggcgcgaaagacaaatagaattgtttggagaaggttttggcttttatgatattagaagatgggctaaagctgcctactatgttaacaggcagccttgtggaatgtggattgaagccaatgataatccttatggtactaaagcaagtaaatattcaggaaactttgttgactatgaaacaattatgactgtaggtcaggcttctggtgaaaataataatgtgggtagcggatggatatatacatatcctagtccattgactaaaggtggatggttggatacctattatttgatgatggttcctactaacgaaatcgttctgaatccaaaacttacgcagaatccaggatataatgaattgtttggtttgaattaataattattgagtattaggaagggaggtaaattgaattttgttgctgtcgattcatttacctcctttttattaatatgaaaattaaatcagttatactatgaataaaatatcgattttttcaggagcacttttggcttcaatttcatctgtgtgtgcatcctctcagcaaaagcctaatatcatttttattctttgtgatgacatgggatatggtgatttaggatgttacggtcagaaatatataagtacgcctaatatagaccgtatggctcaagaaggaatgagatttactcaagcttatgcaggtagtccggtgagtgcaccttcgcgtgctactattatgacaggacagcattctggacattctcatgtacgtggaaacaaagaatattggattaatgttccgttaatgaagtatggggcgaatgatgaatatacggttgtcggtcaggaaccatacgatccgaatcatatcattcttcctgaaataatgaaaaaaaacgggtatactacaggtatgtttggcaaatgggccggtggttatgaaggttcttgctctacgccagacaagcgtggtattgatgagtactacgggtttatctgtcagtttcaggctcacctctattatccaaactttttgaataggtatagcaagtcgaaaggagatactgctaccatacgtatcacgatggatgaaaatatcaaatatccgatgtttggtgatgattataagaaacgttctcagtattctgcagatttgattcatcaggaagcattgaaatggatagattctcaggatggtaaccagcctttttatggattttttacctacacgcttcctcatgctgaactggttcaacccaatgattctatattggaacattataagaaaaaatttttccatgataagacctggggtggatctgaggatggcagatacaatccgtcagtacatacacatgcagaatttgccggtatgataacccgtttggatacatacgtcggtgaaatacttgcgaaactaaaagaaaaagggctggatgaaaacacaatagtaatatttagtagtgataatggccctcatgaagagggaggggctgaccctgaattttttggtcgtgacggaaaattgcgtggcttgaagcgccagtgttatgaaggtggtatacgaatcccgtttatcgtgcgttggccggggaaagtgaaagctggtaccgtgaatgatcatcagcttgctttttatgatattatgcctactttttgtgaacttattggtgacaggagattccctaaaaaatacatcaacaagaagcttaaaggtgattgctttgatggtgtttcttttgcttctacattgttaggtgatgatacaagtcagaaaaagcatgattatctttattgggaatttcatgaaacagatcagatggctgtacggatgggagattggaaacttgtagttaagaagggtgtttcttatctgtataatttggctgacgatattcatgaggacaatgatatttctaccaatcatccagaaataataaagcaaatgatagagataataaagaaagaacataaggaaagtgatttttttaaggtgactttgccattatgaaaaagaatacattattcctttttgttttttgatgttaccattcctatacattcttgatataaagagctggatatttattatgattcttagtctgaacgataaattttcatgataagttttcttatatgctaagctaaagagaaaatggtatttatggatatgttacttttctgtgacaagtttaccttcaaatagaatctgctttatgaattgagctcattctggtatatttgtacttaaaattttgtggtatttatctattagaaaataataaaataaaaaatgtaatttacatatccttttttacttcaataaatagttatacattcgtgcggtttttgcaaaatatgcaaagagagaaaatagagaagtctaaccgttagtaatgttatactatgaagctaaagtattattctgtcttgtctctgtgtgtacttgggggcttgttgactacccctgcctctgtatgggctgcacagtagactgagataactatcagcagtgccagtgtgctgaatccgtcggcggtggaagtggtcttttccaaccagcagcgcatgacgcttggtttttatggtgaaaatattttccggatgttccaggacaatcagggaggcattgtgcgcgacccgcaggcttctcctgaagctcagattctggtagaccgtcctcgaaaggaggtcggcgagctgtcgctgacagacaagaacggagtgattacgatttctacggccagaattcagatagaaatggacaagcgtacatcgctgttcaagattacggataaaatccgccagaaggtggtagtggaatcagcacgtccggtggactttatggaaaagcaagtctgcctgtcactcaaagcacacaataatgagtatttttatggaggtggtgtacagaacggccgtttttctcacaaaggaaaaagcatccgtattgtcaatacgaaccagtggacagatggtggagtggcttctcctactcctttttactggtctacagaaggatatggggttatgtggtacacgttccgtcccggactatatgatttcggagcaactgataaggaagtagtgaagctgtcgcatgaggaaaactatctggatgtctttttcatggtaaatgatggaccggtagccttgttgaatgatttttatcagctgaccggtaagccggtgcttttaccgaagtttggtttttatgagggacatttgaatgcctataaccgtgactattggaaagaagacgaaaagggtattctgtttgaagacggaaagcgatacaaggaaagtcagaaagacaatggtggtattaaggagtcactgaacggtgaaaagaacaattaccagttctcggcacgtgcggtaattgaccgttacaatgcggctgatatgccgttaggatggattctgcctaatgacggttatggggctggttacggacaggcctccactctggatggtaatattcagaacctgaaggaactgggtgaatatgcccgtgctaaaggagtggaaatcggattgtggacacagttggacttgcatcccaaagaaggagtagaagctttgcttcagcgtgacattgtgaaagaagtgcgcgatgcaggtgtgcgtgtattgaaaaccgacgtagcttgggtaggagctggctattctttcggattgaacggagtggccgatgtgggacagattatgccttattacggcaacaatgcacgaccgtttattatttcactggacggatgggcaggaacacagcgttatgcaggtatctggtcgggcgaccagactggaggtgaatgggaatacattcgtttccatatcccgacctatatcggttcaggattgtcgggacaacctaatatttcttcggacatggatggtattttcggtggaaagaatattccggtcaatatacgtgacttccagtggaaaacatttactcctatgcagttgaacatggacggatggggggcaaacccgaaatatccgcaagtgctgggtgagccggctgcttctatcaatcgctggtatctgaagatgaaatcggagttcatgccttataccttatacttacagcatagcccgtgaggccgtggacggaaagccgatggttcgggccatgttcctggattatccgaatgattatacactgggaacggctacccgctatcagttcctttacgggccttatgtactggtggctccggtatatcagaacacacaggccgatgcggacggaaacgatgtacgtaacggcatttatctgcctgaaggaaactggatagattattttaccggcgacttgtatcagggcggacggattcttaataattttgaggcgcctttgtggaaacttccattgtttatcaaacagggggctattttaccgatgactgcagcacataacaatgtgagtcagatggataagcatttacgtgtatatgaactttatccggctggcgatacagagtttacggaatacgacgacgatggagtgtctgaagcttatcgtgcggggcagtatgctactacgcatatccgttccgtggtagagggagagaacttgacagtgtgtgtagaaccagtgcaaggctctttcgaaggaatggtagcgcgtaagcgtacccatttccgtatcaatgtaactgcacagccgaagaaactgacagtacgtgtaggcggaaagaaagtgaaactgactccagtgacttctttggaagaattgcagaaaggagcgaatgtatattattatgagtcgagtccagagttgaatcgttttgccactccgggtagtgaacaggctcgtctgcacgtcattaagaatccagtggtacatgtgaatctggaagaaatggacgtgactcaaaacgatattcagttggaaatgaaaggttttgtgtttgcacttgctgagaaactgttggtgagccaaggaacactgcgtgctccggaagcagaggtgacggaagaaaatacaggggcttatacattgacaccttcatggaaaaaggttgacaatgccgattattatgaaatcgaatacaacggtatgctgtatagtaccattcggaacactcaacttctgtttgaagatttacgaccggaaactacttgcacgttcaaggtacgcgccgtgaatgctacaggtgcatcagaatggactaatgtgacggctactaccaaatcagatccgttggaatttgctattcatggaatcaagggagaaactacttgtccgaatcagggaggtcagggagtgaataaactctttaacttcgatgagggagatgcatggcatacgaagtggagcacggctgcagttccttttgatttgattattgacctgaatagtgtaaaccagttggataaattccagtatctgcctcgtctagatgccgggaacggtacattgggcaagggtactgtatattatagtatggataagtctgattggcacgaagctggcactttcgactggaaaggaagtgacgtgaagacctttgtattcgagaaacagcctgttgcacgttatattaagttgtcggttgtatctgctacaggtcagtatggttcaggtcgtgaactttacgtgttcaaggtacctggctcagaaagctatattccaggcgatattaaccaggataagctggtagatgagaatgacttgacctcttatatgaactatacaggcttgcgcagaggagattctgactttgagggctatatcagcaagggtgacttgaacgagaacgatctgattgatgcgtatgatatttcggcagtagccatccgtatggagtcaggagtaagcagtcgtcaggtaccttcagtagctggagaaatcacgatcactccatctaagaaagtgtatagtgagggagaaaccgtagaaattcgtgtctccggtaaaggtttgcgttcggttaatgctctcagctttgcattgccctatgaccctcaggcactggaatatgtaggaacagagatgactggcatgaaggagatgcgtaacctgaccaatgaccgtctgcatacgaacggaacgaaggctttgtatcctacttttgtaaatattggagaaaagccttacctggaaggggatgctgaacttatgacaatcaagtttaaggcaaaacgtaaacaaaagattgacttgaatgtactggacggtatgctggttgacaagaatctgaatacagtgaagttttgatagcttatccgggactcgttcccggatataaaataaaaagagaggaaaatggttgtctgttgagttggacaatcatttttctctctttttataatgcagataaagattctatcagatttttaatccgtccaagatttgcacataggttgaaattgcttcctctatttcactgacgagaatgtattcatcggctgtgtgcgaacgggaagattttcccggtcccatttttacagaagggaagggcattaatgcctgatcggataacgtgggtgatccgaatggtactttccccagttctatggcacgtttaacaaacggatgatcagacggaatgctggaagaattgagacggaatgagcgtgctttggcctcactctgtatatgttggcagatttcggcgaacagctcctcgttagagtaacattcgttgcttcggatatccaccacgatgctgcacaaatcaggaattacattgtgctgtgtacccgcattgatctgagtgacactcattttgacaggtcccagaatgggtgattctttagggaacttatatgtacggaaccattcaatatctggcagtagcttgtaaatggcattttctccttcgttacgtgcagcgtgtccggattttccatgtgctgtgacgtcgagtaccataagtcccttttctgcgatggcaggttgcatttccgtaggttcacctactactcctaatgcaataggagggagttgaggcaggacgctttcaataccgttttttccggatacctcttcttcgcaggaagccaggaaaatcaggttgtagctttgggttgtcatgctaaggtgacggtacacctggaataatgataccagactggcaccggcgtcattgctgcccagaccatataatttcccgttttcatttttgggagtaaacggctgttttctccatccgctgaccggcttcacggtgtcgatgtgtgaattgagcaggatggtaggtttattgatgtcgaacatggggctgatgcaccagatgttatttccggatcttccggtcatgattcccgtttcttctatgtagttttgcaggaagtctgctgcggcttcttcttcccggctgatggacgggattccaatcagggaatgtaacagagtcagtgcttcagatgtgtagtaacctgtgtctatcataaataatccgtttttttgattctttgcaaagatagtcttttttaggagaaatgctttagattggccggacattgcaaataaaatcctatatttgcagaataaaccaataaaatgaagtaagatagatggttaattcatgtttgtcccggcttgtacgacaacaagctgaaaaatatggggataaagttgccttaaaataccgtgattacaccactgctacatggattcctgtcacatggaacgggtttgctgatctggtagataaaacagcccgtgcgtttgtaaaattaggagtggaagtacaggaaaatataggagtattctctcaaaataagccggagtgtctgtatgtagattttggagcttttaaagataggattgtaactgtgcctttgtatgccacaagctcagaagcgcaggtacattatattgtagaagatgctggaattcgttttttgtttgtaggagagcagtatcagtatgatgtggcttaccgggtgcagggcttatgtcgttcattgaagaagattattatatttgatcccgaagtaaagcgtgccgaaggtgacaataattctatctatttctcagactttttgcagatgggtgaaaaagaggagtgtcagccggaagtggataaaagggtttctgagtcttctttggatgatttggcgaatattctgtacacctctggtacgacaggtgattcaaaaggggtaatgctgcatcactctaactacgacgttgcttttaaagggcataacgcacgtctgaccaatctgggtgaaaatgatgtcgtcatgaatttcttgccgtttacgcacatttttgaaagggcatggtcgtattattgtttgtacaaaggatgtatgctgtgtatcaatctgcgtccgcaggacattcagaagacaatcaaggaagtacggcctacggctatgtgcagtgtgcctcgtttttgggaaaaggtatatgccggagtacaggaaaaaatcaatgagactacgggcctgaaaaagagcttgatgctggatgcgcttcgggtagggcgtgaacataatattacgtatctgatgaacggaaagacgcctccttccttgttgcacatgaaatataagttttatgagaaaacaatttatagcctgttgaagaagacaattggaatagaaaacgggaatttcttccctacagcgggagctgctattccagagaaagtagcagagtttgtgcattcggtgggcattaatatgatagctggttatggactgacagaaagtacggctacagtctcttgtgaatggattggagatttccgtttgggagcggtagggcgtgtactcgacggagtagaagttcgtattggagaaaataacgagatacagcttcgtggaggtaccataacgaagggatattataagaaagaagccattacccagcaggcatttacagaagatggctggttccgtacgggagatgccggatatatgaaggatggtttcttgtacttgacagaccgaatcaaggatttgttcaaaacttccaacggtaagtacattgctccgcaggccattgaaaccaagctggtggtagaccgttatattgatcaggtgaccattattgcggaccagcggaaatttgtatcggccctgattgtgccggaatacagtcaggtggagaagtttgcgcaggaacatcacattgcttttggaagcagaaaggagttactggagaatcctcagattattgagttgttccgtcttcgaattgatacgcttcaacaggagtttgcgcattatgaacaggttaagcgctttactcttcttccggagccgttcagtatggaacgtggcgagctgaccaacacgctgaaactgaaacgtgcggtggtagcccgtaactacaaggatattatcgacaaaatgtatgaagaaaatgtcggttaaatagctgacttttatctacaggcactctttcaggggtgcctgttttttcatatctttgcaacgagaaaaaataacagactaatttatcgtattttatgattaccatagagcaactgaaagacgtgaaggaacgtacggaagccttgtatcgttatctggacattgaaggaaagaaaatacaggtggaagaagaacagcttcgtacgcaggcacccggtttttgggatgaccagaaggctgccgaagcgcagatgaaaaaagtaaaggctttgcagcagtggattaccggttatcaggaagtgaagacattggcggatgaactgcagttgtcttttgatttttataaagatgaactggttactgaggaagaagtggatgaggcctattcaaaagctatctctgcagtggaagagctggaattgaagaatatgcttcgttcggaagctgaccagatggactgtgtactgaaaatcaattcaggtgcaggaggtacagaaagtcaggactgggcttccatgctgatgcgtatgtacatgcgctgggctgaaagcaatggatataagttgtcagtagctaaccttcaggaaggggatgaagccggcatcaagacggtgacgatgaatattgaaggatcctatgcttatggttatctgaaaggagaaaacggggtgcaccgactggttcgtgtatctccttacaatgcacagggtaagcgaatgacttcttttgcatctgttttcgtgactcctttggtagatgattcaattgaagtaaccgtagaaccggctcgtttgtcatgggatacattccgaagtggtggcgccggagggcagaacgtaaacaaggtagaatctggtgtacgtctgcgttatcagtataaagacccttacacaggcgaagaagaagaaatcttgattgaaaatacggaaacccgtgaccagccgaagaataaggaaaacgccatgcgtcagttgcgctctatcctttatgataaagagttgcagcaccgtatggaagagcaggctaaggttgaggccggaaagaaaaaaatcgaatggggttctcagatacgaagctacgtattcgatgaccgacgtgtgaaagaccatcgtaccaattaccagacatcggatgtcaacggggtgatggatggaaaaattgacggtttcattaaagcttacttgatggagttttcagatagcgaaatctgataactttgagtaaaatcgctcttttttatttgtctttttgcaaagatgttgtaattttagggttgtaaatctaaaattgaaaacttatgggacgcaacagaagtgtaaaaagacagaattttgaaaaacgtgaggaagaaaaagccaatagattgttcaagatgatttgtattgtcttgattctattggctattttaatgattgtaggttacacattggcttcttgatagcttagatagaatatgccgcaggaaatagaacggaagtttctggtgcgtgatgattcatataaagctatggcttataaaaagaagcgtatcaggcaagggtatatctgtagtgaaagagggcgcaccgtgcgggtacgtatccagaatgaggaaggttatctgaccatcaaaggaccttcagatgtatcgggtatgagccgttacgaatgggagcatgctctttctttgcaggaggcggaagaattgatgaggttgtgcgagccgggaatgattgacaaaactcgttatctggtacagtgggggacgcacgtttttgaggtggatgaattctacggagaaaataatggactggtcgtagcagaagttgaattaactgacgagaaggaaacttttgaatgtccaccttttttaggggaggaagtcaccggacaggtgaagtactataattcgttcctgatgaagtcaccttatagtaaatggggtgaaaaccttcctgaaaactgtcagaacaaggggtaaaaactctcaattgacagtttttacccgtttgaatatcagattttgtgaagagtcttctttgtttttctactaatattgcagtgtcgaaaccaagacagacattgtttcaattaaagaaaagaaagactaaaagaattatgaaaacggcaacatttgctcagaacttattgagcatgcagacagaactacttcatttcgcttataaattaacggcagaccgcgaggaagcgaatgaccttctccaggagacttcattgaaggccttggataatgaagaaaagtatgtagcagaaacgaacttcaagggatggatttataccatcatgcgtaatatatttatcaataattatcgcaagactttgcgtgaccagacatacgtagacaataccgacaatcagttcttcttgaacttgggagtggatattgaggatgactccatgcagggcgcttatgatttgaaggaaatgcgccgcattgtgaatgcattaccgaaagaatatcgtgtaccttttgcaatgtatgtatcgggctttaagtatcgcgagattgcagataaattgaatctgcctttgggaacagtgaagagtcgtatttatttcactcgccagagattgcaggaggatttgaaggatttcagataaaaacgataactctctatctttaaaataatatatttaatagacgccggttgctgtgagagcacccggcgtttcgtctttttatgacttggagtcaggactccggctgtgatattttttctggatgaacgggcgataaatgtagtgccctgccagtgaagctaagcatactcctgtgcagttggcaataaaatcaatccagtctccgctgcggttatctgtacagcatgactgcaggatttcaatgcatccgctcatcaggatgggaaacaggatgcttcccatgattagtgggaaactcttgatttgcttgtgctgaatcaggtattctatccatataatggaacttagaccgccatacatgcatacatgtaccagtttgtcgaagttattgatttcctccaattgagtgtgtggaggagtaaaaaaggataggtaccaaatggcaagaaccgtcaaaatagaaaatggataatgtcttaaaatctgcattttgtgtaaaactttaatctttcgtgcaaaaatacgatattttttgtacttttgtctccgttttgaagtgtaattataataaaatgatgtatgcagcacaaaagtgaaagagtgaattttggaagcaaattaggtgcaattcttgcagccgcaggctctgcggtagggttgggtaacatttggcgtttcccttatgagacaggaaatcatggtggagctgcatttatattgatttatctgggctgtgtcattgtattcggactgcctataatgattgcggaatttactattggtcggcgtgccaaggcgtgtacgggtggagcgtatgaaacgttggctccgggtacgcactggaaatgggtaggctatgccggagtattaaccggctttttgatattaggatattattcggtagtagccggatggaccttggagtatgtatggcaggctgcttcattcggattgtcgggaaaaacttctggagaatatgtatccatgttccaggatttctctcagcaaccgttccgaccgcttctgtggttgtttgtgtttatgtttgttacccatttcgttattgtgaaaggagtaaaagacgggatagagaagtcttctaaaatcatgatgcctctgttgtttgttctggttattctcttggcaggttgttctattatgttgccaggggcagaaaaaggtatcaaatttttgcttcatccggattttagcaaggtaacccctgatgtctttttaggagccatgggccaagctttcttttccatgagtctgggaatgggatgtctttcaacttatgcttcatattttggaaaggagactcgtttgggacatacggccatgagtgtaggtctgattgatacatgtgtggctgttttggctggtctgattatttttccggcagctttttcagttggtatccagcccgatgcaggtccttctttgatttttattactttgcctaatgtgttccagcaggcttttgccaatgtacctttcctggcctatatatgctccgtagctttctatgtgttattggctttggctgccttgacgtctacaatctctttacatgaggtctctacggccttcttgcatgagaagtttcattttacacgaggacgtgcagcctgcattgtaacaggaggatgcctgttgataggtgtggtttcctcattggctttaggagaatggagcagcgtgaagattggtggattgaatatgtttgatgccttggactacctgacggctaaaattatgcttccggtatgtggcatgtttgcggctgtgtttgtcggttgggtattggataagagcatcgtaaaaggggaggtaaccaattatggaatgttgaaagctccttattttccagtgtatctgattgtgctgaagtttgttgctcctatcggtatccttgccatctttatcaatgaactgggattgttgagctggtaatgtggaaagattttttctattattcccgttctgaaagaagagtaattctacttcttttagggctgttgataatcttgggcatttcttggttggtatgctggaggctctataggacagaatatgtacgtcaggaggattctgctgagatagattctttcctggcttctgtgaagcaacgggagactgcctatgcaaagcgtaattatacggcatcaggtgtcaggaaagggcaggaggtcgttttgtttgattttaatccgaatacagccgattccgtacaattgaaaaaactgggattaccttcctttgtggttcgtaatattcttcgttatcgagaaaagggagggacttttcgtactccggaagcttttgctcgcatttatgggttgaaggaggaacaatatttattgctgaaaccctatatccagataccgccaagagaggagaataaacaagattctgtttgcgaacaggttaaaatacaacgaattgaaaaatatccggaaggaacccttgtggctttgaatgaagcggatacagcccaattaaagcgaataccaggtgtgggaagcggtatcgccaaaatgattgtggcttatcgtaaccgtcttggaggttttgttcgtttggaacagttacaggaaattccgcatgtagatacctgtctgaataaatggtttgttgtgcaaggtactccttttcggaaaatacgagtcaataaagacggattggataaattgcgcaatcacccttacatggatttttataaggctaaagccattttagagtatcgccggaaaaggggtaatataaaaggtctttcccggctctctctctttgaagagtttaccgaaaaagaccttcaacgcttgtctccttatttatcttttgaatgatttatttgcgtgtatagcctgctgcttcagcaatttttaccggaatctcggtattgtcaattcggttctggaatttttcggctccggctccaatggcaaagacaggtacatatcctgcagagtgtcctccacttgtccagccagtcaatgctatttcattgataattcgtttagcttcagctgcaatgggctcgtcttgagcatattcactcttttccatttttacttgttggtttttcagagtctgctcgtacacggttttcaagcgagcttcctgtttttcgtttaatttgattttatcccaaaaaccaaagttgtcttttaaagcctgttgtacagcttcccaggatacttggttattcgtcttagagcgaagctggttgatgactctggtgaatccgctttcactgaccttctggttcttgaatacctgcaggttcagctcatacggaccttttcctaaaacaaaacctccggtttcatggtcggcagtaactacaattaaggtttcatccggatgttgtgagtaaaattcgtaagcaaccttaattgcattgtcaaagtcgattacttcatgaaaggtcgtagcggcatcattgctgtggcaagcccagtcgattttcccaccttctaccatcaggaagaaaccttttgataaatctttagagaggaaattaattgccgaacgggtaatctcctgcaaagtaaggtcgctttttccccggtcaatagcgtatggtatggaagaacggtctgacttagaagcggcttccggctggaacagaatcatcttgtcagcttttttgctcttcttgagataatctttatatcctctggcaatggtgtatccgtattgatcagccagtgagtaaaggttggctgcttgcggatttttcttgtcctgcggctgaagaaaatctgaaccggcatagaaatcaaaaccggtttcatataagtcttttccgatttcataataacttcctctacctgaagcatgtgcatagaaagcggcaggagttgcatgatccacactgacgctggtagccactcctacccggcatccgcgttctttagcccatgtagctacactgtaaacgggtgtttgtaaatcttttaacactccgatggcaccattttttgtcttgtttcctgttgcaagtgctgtaccagcagcggcagagtctgttactccgttagtcgcagaaaaggttgttgctacggttgtgtaggggaactgagtaaattgtaagggtgtgataccgatttttccttcaagttcacctagatacaattctgtaccttgcacttgattgactcccattccatctccgatgaaatagaatacgtatttggcttgctgtgcatttatttgacaaaaagccagtaggaaaaataggatagtgatggataattttttcataaagccttgtgttgagtttatttcttcgcgaaaataagaaaaatacagcttcaagaattttttttcataaaaagatgcgataaaaagggaaacgttttcagattctttcattttaattattgaatgatgttacgttattaaaacatttagttatgaaaaagaaaaatctattaggggcatatttagtcttgtccctgttggcttcttgccagcaaaaagagaatttgcagcacatgggtgatgagttgaaattgagtttacaagcttcggtgtatgctccttccaatggctccagggttgtgacggatgaatctggagttacgactttttcagaaggtgatgagcttggcttttttatgccggaagagagtgagccagtgaaatggacattgactgaaggccaatggatttcagcatctcctctgtcatggaaagataaggttaataagtttacctattgtgcgtattatcctttttccattgaatcaacgactcgcgacaatattccgatgccagatttgagtttgcagaatggaacattggcgggtataggtgaatttgattttctgacagctcgctgtgaggccagctatgaggaaacggataatggaaccgtttcgtttacgggtgaatcgtctttcagacatgcatacagctttatttctataacgataaagaaagatttgtcggaagaaaatgtattgatcagccaggcttcttttcagggagaaaatttgtttagccgtagtacctatcactttgcggaatcggaagcagaagatggtatttcctatctggagtcatctgaagtgcatgcattgaccttgaattttgaggagccagctaccgtcacagaagaatcaggctatacattgttcttgttatgtaatccacagtctttggtagaagattcaggattttctatttcctatcagcgagatggagtgtcttatacggcatctaccaacaaattaggaaagcagtttgaagcgggtaaatattaccagtttgtgttgagattaacgaaagaagaattgaaagtggaaggttgtgaagtgtctgactgggtttctgagaaacttccggaaatagccattgaggaaataccgtcgtaacccgactgttagtgattgcctccggagaaatcttgaatgggtttctccggattttttatgtctgtttttatctcttgaaatagaattgtcataaatctcagaaaaaacatgtaactttgcaccttcaaataaactaacagtcaatttcgttcatttaacataacaatgaaagcacttaaagaccgcatcattcgtgatggaaaatgctttgagggaggcatccttaaagtggataattttattaaccatcagatggatcccattctgatgaagtcaatggcagtagagtttgtacggagattcgccagtacgaaaatcaataagattctgaccatagaggccagcggtatcgctcctgccattatggttggctatctgttggaacttccggttgtttttgccaagaagaaaaaaccgagtacaatggagaacatgctgacaactactgtctattcgtttacgaaagaccgcacgtacgatgtgtgtgtaagtaaggattatttatgtccgggcgataaggtgttgttcattgatgacttcttggccaatggtaatgccgcaaaggggattattgacctggtacagaaagcagaagctgaattagtggggatgggcttcctgatagaaaaatcgttccagcatgggggagattatttgagagcacagggcattcatgtggaatctttggcgataattgaaagcttggaaaattgtcaaattaaaataaaagactaaatctttaaatggaaaaagaacaacagcaaactgctcagagtgctgggcttatttacgggttgaatgaccgtccgcctttaaaagattctatttttgccgctttgcagcatttgttggcaatctttgtggctattattactcctccgctgattattgcaggagcattgaagttggacctggaaaccaccggatttttagtttccatggctctttttgcatcgggtatctctacatttatccagtgccgccgcgtaggaccgataggttgcggactgctgtgtattcagggaaccagtttttcattcattggtccgattatttctgcgggcttaaccggtggactgagtgctatcttcggagcttgtattgtagcttcttcggttgaaatgttaattagccgggtgttgaaatacacacgtagagtcattactcctttggtatcgggaattgtggtgacactgattggtatgagtttgattaaagtgggaatctctgcttgcggaggtggagctgctgcacaggcagatggtacttttggagctttccgccatattggtttggccgctttggtacttgtcttgattatctttttcaatcgtagttccaaccgttatttgcgaatgagttccattgtcatcggtctggtggttggctacgtattggcatgggcattgggaatggttgatttttctgctgtacagagctatggtggtttcaatattcctatccctttccgttacggtatttcatttgatatttctgcaatcatcgctttagcgttagtttatttgattacggcaattgaagcgtatggagatattacagccaattcattgatttctggagaaccggtggaaggagaaacgtttgtcaaacgtgcttccggaggcatcttggctgatggttttaattctatgctggccggattcttcaactctttccctaactcgatctttgctcagaataacggtatgattcagttgactggagtagccagccgctacgtaggatacttcattgcaggtttccttatcttgttgggcttgttccctgcagtaggattgattttctcgttaatgcctgaaccggtgttaggtggagcaactctgttgatgtttggaacagtggctgccgcaggaatccgaatcatttctgcacagaaaatcaaccgtaaggctacgctggtgatggctttgagcttttctttcggcttgagtgtggaacttgtgccggatattctttgtcagttgccggaaaccgtgcgtaatatattctcttcaggtattacaactggtgggctgactgccatcctgtctaatctgctgattcagataaaagagtaaaaaaacatattggataaaaagaagaggctgtctcaaaatgagacggccttttttgtgtttgcaaaaaaaatcgggcaagtcctaacttcgctcagtcagaacttg

SEQ ID NO: 3755 - DNA, 22860 bp, Unknown
  gut microbiota DNA sequence
ttttttgagaaaaatccaaatgacttcaatttgaaataaaacaaaagaggccatctcaactctattttgagacagcctctttattttatcagttttagcgaacatatttgtcagtaaacgcttttaccttttctgtgtactcatccggatacaatttgtaagaatgtgcgtggtctacgccttctgtaatccagatttccttgggagaaggcttggcggcatataccttgtgcaccatccatgtgggtacaaaatcatcgttgtcgccatggatgaagagcatgggcttcgtacagcgagccacttgcgagagggcagacgcttcctgaaagttccatccgttctggagctggcaaatccagctggccgtgtagagcaacgggaaggggggaagtccgaaaagacctttcaactctttgctgaactggtcccacacgctggtatagccacagtcttctacgaaacaggtgatgtattcaggcgttttttctcccgacaccatcattgtggtggcagcccccatcgaaataccgtgaaccaccgccttcagcgagtcgccaaacagagccggagctgtatcaatccattgcaacacgtcctttctgtcaagccagcccatctgtatggcatctccttccgtcagtcccgtgtaacgcaggtccggcagcagaatgttgtaatccagcgactggttatagaggtagccgatgtggaacatgcggatggcattgtccgtatatccgtgtacgatgatggcagtacgtcgggtagggcgagaagcacgtgcataaaacgcatgcatccggatgccgtccggtgcggtgataaacgtatcccgcaaggcatggtgctgttgcaggctgtccagccaggggacaatctgcggatattcagttcgcatgaacgcttcagattcctccatattctttccccggttttccgggcggagtgaaaagtctatcaggtaaaggcttcctcctatgcaaatccccactatcagtacaagcagaattcctgctgtccagccaatttttttcttcagtgtcatgtaggataaatgtttagctgttccagatgtcccaagccccgaatgcctgtagcaggagcatttccagtccattttttacaatggctccctggtcgctgccttttttcatgaaaagcgtggtgttggggttgtacagcaagtcatacagcaagtgctggggagtcagcagttcatacggaatattcggacattcatccgctttcggatacatacccaccggtgtgcagttgacaatcaccttgtattcttgcatgatttcaggtgtaatttcttcgtaagtaatggtcatgtcattgtgcttgttgcgtgaaacgaacagcacctccagtcccagttgcttcaatccttgatgaatggctttggacgctcctccggtacccaggatcaatgccttcttgtgataaggttccagcagcgcttcgatggaacgcacaaatccgataatgtccgaattgtatcctttcagtttggtgcctcccttggtgtgttccactttaattacgttcaccgctccgatttcgcgtgcatccttatccagttcgtccagataggaaataactttctctttgtaagggatagtcacattcagtcctgcaagcgaaggatttgcctgaatgatgtgcggaagttcatcaatgcttggaatttcaaagttcacatattcggcatcaatattctcggaatggaacttctcattgaaaaaatttctggagaatgagtgtccgagcggatagccgattaagccaaatattttcataaggttcaaagattttagttatttggtagcgaaatagagtgtgcaagtgcccattgtcaggcgcttgaattctacctggctgaagccggctttccggataatttcctgcatgatttctccttgggggaaagccttgatggattcaggaagataagtataggcactacggtctttcgacagcagtcttcccagtgcaggtatcaccaccttagagtaaactgcatatccttgtttcatagggaaatgttccggttccgacagttccaggatgaccagatgtcctccgggaaccagtaccctgtacatttctttcaggccgaggtccaagtgttcaaaattacggataccgaatgccacggtaatggcatcgaaccggttgtctgggaacgacaaagccgtacagtcctcttttgcaaaagaaatctgcttgtccagtcccagctgttttactttttcccgtcctacgttcatcatgccttccgaaatgtccgtaccaatcagttcggcaggttgcagcatctggcaggcctgaatggcaaagtctcccgttccggtagccacgtccatgatgcgttgcgggtgatagggcttcagcaggcggatggccttttttctccagcttttgtcgattccccatgacatcaggtggttcaggttgtcgtaggccggggcgatatggtcgaacattttctctacctgagcagccttgccctcatcttcattgtatggcttgattttttcttgtggatagtgagacatgcgaaaaatattaggatgggataaattttgaatctccctttaaggcagcacgtgccgccttaaagggagatagggatattaaagagtcaaataatctgttacgttcttttcgatacgtttggtcaggtcttctgtttcacccttcacgaagctttcgccagtgatgtgttcgtacagttcaatgtagcggtcgctgatagattctacgatagccggagtcatttcagggacctgctgtccttccttaccctggaatccgttggccatcagccattcgcgtacgaattctttagacaactgtttctgcggttcttctttttcgaagcgttcctggtaaccttcagaatagaaataacggctggagtccggagtatggatttcgtccatcaggtagatttcaccgttgtgctttccgaattcatatttggtatccaccagaatcaagccgcgttcagcagccatctgagtaccgcgttcgaacaaagctaatgtatatttttccagtgtggcatattcttcaggagtagccagacctttcgccaggatttcttctttagagatatcctcgtcgtgcaatcccatttcagccttggtagtcggagtgataatcgggtgagggaacttttcgttttctctcatgccttccggcagacgcacaccgcagatttcgcgtacaccgctcttgtaagcacgccatgcacttccgcacaagtaaccgcgtacaatcatttctacaggaaatccctggcacattacgcccactgttaccatcgggtcgggagtagccagtttccagttcgggcagatgtcagtagttgcatccaggaatttggctgcaatctggttcagcatctgtcctttataagggataccttccggcaatacgacgtcgaacgccgagatacggtcggtagcaaccattaccaacttttcgtcattgatgttatacacatcacgtacttttccatgatacacacttttctgtccaggaaagtgaaagtctgtttttgttaatgctttactcattgtcttgttatgtttagtaatgaatagaattcatttatggtttatgcctgcggcgttttttccggttctttagccgtacgcgtagtttttctttctgctttctctttctcctcgaatttttcgtaagcctccacgatgcgtgtcaccagtttatggcgtacgatgtctttcttgttcagttcgatgaagctgatgcccttcactcctttcagaatcttgatggcctgcacgagtccggaagtctgcgaagcgggaaggtcaatctgtgtcatgtctcccgtgacaatcattttggtgttcatacccatacgggtgagaaacatcttgatttgctgggtagtcgtgttctgggcttcgtccagaataactacggcatcattcagcgtacgtccacgcatgaaagccagtggggcaatctgtatgacattcagctccatgtattccttcagcttggcggccggaatcatgtcctgcaaggcatcgtacagcggttgtaggtaagggtcgattttatccttcatgtcgcctggcaggaaacccaatttctcgcccgcttccacggcagggcggctcaggatgatttttttgatttccttgttcttcagcgcccgtactgccagtgctatggcggtataggtcttacctgaaccggcaggaccgatagcaaaaatcatgtcattcttttcaaactcctgcactagtttcagctggttctcgcttctggggatgatgggcttacccgtcacactgaacacgatggcgtttcccgccttttccgttttaggcgcattgccttttacgatgtcgagaatcgtttcctcattgagcgagttatattgcacgcaatatttttccagtgcaagaacggcttcttcgaaggcacacatttcctcctcatctcccatgaccttgatgacattgccgcgtgccactattctcagtttcgggaacagggccttgatcatttgtatgtgggcgttgttggggccgtagaagattaccgggtcgatatcttcgagtacaatatgtttctctatcatttagcttgttctgattcgcttatatgctttattttttgcaaaaataatcataacttttgattgtagaatgagaaagcagcagaaaaatatcctacttcaactctttcattttatagcgttcgccggttgcttttaccagttcctgcaagaattccttgctgtatcccggacggtccagcggagctgtgtttcctgttttcggacgttgcagctgtccgttctgcatgcgttttaccgcaccgtcgttgtagcgtacaatcaaaaattctcccaacttcttccagctgtctacagcagtctgagccgtcatgtgggtatagttggtcaggtattcttttgccttggccggattctgctgatacagtttcaaggctgcactttcaatgccttcctgcgattgtgcataggtatcttccagcgtattctgtacggtgcgcatgtcttccaccatcaggttgtagcgcggacgaatcatgtcggccacccagttgtagatccagaaagcagagtcccatgagaaagttacgcagtcgccgttctcctgctgatacggataaggtaccttgtctgtgttgcagtacaccggagtgaacaccgtcatgttggcatcgtccagtccgaaccagagcacaccaccgatggcgtcgggcagggtagagcgcatctgcgatacgaatacgaacgcactctgctgagtagagatggggcgttcgttgaaatattcctgaccgtcaacgttgaacgtcagcggagacagacggtaaggcatctggaagcagccggctcccatgtcttttgtaatgtcgagggccgtaccttcgtagtggtcacgcatggcgtgctggatgtcgcgaacagaaaccttgttgtcaggttttacgtacaaaggcatcggttccttgctgtcaccttgaatgtaagaaaggtaagactgtccggttgatttgctgaacatgttgtagaaactccatacacgtgcttcgcagaaacgcaggccgctaaagtcgagcgggcaataggcatcggcaaagctgaaatccttgtttaccccactgaaataacctttctcacgggcaaatgaaatgacatcgggcgagtacagacagttttccttgtcgttcatgtcaaatttatggatgcggctctggttggcatgtgcggcaatgcagtcgtccggaatgcgtacagccacccatacggctcctttcacgcccggtcccttaccaatcatttccataatccatgcttcgttcgggtcggcaatggagaaagactcaccgctgctgtaataaccgtattccttcactaagtcagtcatcaccttgatggcttccttggcggtgcgtgaacgttgcagtgccacgtaaatcaggcttccgtagtccatgatgccggtgctgtccaccagttccggacgtccgccgaaagtcgtttctccgatagtaacctgaaattcgttcatgttgccgatgacattgtacgtctgtttggcttccttgattttaccgaggtatttgcccgaatcccagtcgtagatgtcgcgcatggtgcccggagcatgctgtgcagccgggaaatggcacagatagccgaacataccgtaagaatcggcagagtaagaaacgatgacggaaccgtcggccgaagccttctttcctacgatgaagtttgtacatgcccatccgttggccatgtatgctgtcagcagaaggacagccagcagtaatcttttcattttcatacgaacagattgttttttatgatttaaaaataaaaggcggttttaaaatttgtattctttgcgtgtcatgtttccgcattggtcggttaccgtcacttccagtttgtgcgatacccctttctttactttctccgggttctgaatcactaaaatgccttttttcaggccaaacaatacgaacttgccgtcgatgtataccttgtagcttccgatgcccgattccatatcctttatccggaaacggatatttcggctggtgcgccatccgccctgaccgataggagtgatttgcggggcaatggtatccacgtccacagagaaggtgccgagtgagcgtacgcgtgtctttatccatccgttggcgtattttcctcccatggaacttcgccattttccggctttctgcacgatgtagtatttcgtggtgtcggccacgggcatgtggcgcaggccgatggacaagtcgcagtagctgtgaatgggtgttcgtccggcatccagtatgtagtcaaaggcgatgtgtgaactgtctccccgcatgtccgtgcggagcggaacatcctcgtacacataatagcgtggcaccaccagttccatacccggtttctgaatgacgttggtccggttccaatatagcatttcattggcttccggcttgtattcaggaatatcctgccgtttaccctttacgataaattgataggtcctgcgatttccaaagttgtcttccagtacataccggaagtgataatccctttcctcgtcgatggtcacagctccccggttctcgttggggtgcagcagtcgcagccggttgcccggaagcttgtaagaacgcataatgagccggcgggtgcgggtcagttcctcatagtcggtaaagccgttgatcatccggttttcatcgggtagtaccttgtcggttgtgctgttgaatacctgcacagagtctacatacagcgtaaccgagtgcaccccgtagaaattcgacgtaccgtccatgtaatctttggcgctgatgccagtataaatctctccccaagcgtgtacaggctgtttcaggttgccgatagcgaggagtttcttatggctggacccgttgaccacccctttcccctgtatgggataaataccgatgaggctgcctacaggtgccttgctgtctttcagcagatgcttgaaatacggcatcgggtcaatgtattcccccgtttcagtgcgtcgcagctccaggtgcaggtgaggtccggccgaagccccttcattaccgcttagggcaatgatgtctccctttttcaccgggaattgtccgggctggaatttcaggtcgcacacaaacgtttcatgcgcatactgatattggcgtacgtaagcttgtatattttttgcgaaggaaatcacgtgtccatacaccgaagtcagtccgttgggatgcgtcacgtaaatggcctgtccgtatcctccgtgcagcactgccacgcgcgacacataaccgtcggcaatgcagtgaatcggtttacctgtaacgccttgcgtcttgatgtccagtccgttgtgaaaatggttcggacgaagttctccaaaattggcactgagcagaatcggaaaatcaaaaggagagcagaacttgctctcctggacgtgctgggcctgggcagacagcattcctcccaaaaccagtgccagtatcattttttgtctcatttttcgtatttgttaagcggttacaaagatattaagaaatcctgaagctacaatctttttggattgactctaaaaaatacgaaggtttttattaggataatttctttgaatcttttatttttgtctgtctcttatagaacgatttattatttattaaacattataatcatggaaaacaatgaattaattaaacagtgtacagagaaggctcaaacgtggttgaccgcagcatacgatgccgaaacacaggccgaagtaaaagccatgcttgaaaatccggataagaccgatttgattgatgcgttttacaaagacctggaattcggaacaggtggtttgcgtggtatcatgggagctggttccaatagaatgaacatctatacagtaggtgctgctactcagggcttggctaactacctgaacaaatgctttgccggaaagaaagacatttcagtagtggtaggtcacgactgccgtaacaacagccgtaagtttgcagaaatttctgccgacatctttactgccaacggcatcaaggtatatttgttcgaagatatgcgtcctactccggaaatgtcatttgctatccgtcacctgggctgccagagcggtatcaatatcactgcttctcacaacccgaaagaatacaacggttacaaggcatactgggaagacggtgcacaggtgctggctccacacgataaaggtatcatcgacgaagtgaacaagattaccagcgtaagcgaaatcaagttccagggcaataaagaactgattcagattgtaggcaaggaaattgacgacgaatacctgcgtcaggtacacacattgtctatcgacccggaagtaatccagcgtcagaaagacctgaagattgtgtacactccgattcacggtaccggaatgacactgattccgcagtcactcaagttgtggggctttgaaaacgtacattgcgtagccgaacagatggtgaagagcggtgacttccctacagtggtatctccgaacccggaaaatgcagaagcactgacattggccatcaagctggcaaaagaaatcgatgccgacatcgtgatggcttccgacccggatgctgaccgtgtaggtatggcttgcaaggacagcaagggcgaatgggtattgattaacggtaaccagacttgcttgattttcttgtactacatcatcaagaaccgtatcgctatgggcaagatgaaaggcaacgaattcatcgtgaagaccatcgttactacggaactgattaagaaggtagctgacaagaaccatatcaagatgcttgactgctacaccggcttcaaatggattgcccgtgaaatccgtctgcgcgaaggtcaggaacagtacatcggtggcggtgaagaaagctacggattcttggcagaagacttcgtacgtgataaagatgccgtttctgcatgttcattgctggctgaaatctgtgcatgggctaaagaccagggcaagaccttgtatgacgtgctgatggaaatctacgtagaatatggcttctcactggaagtaacagtcaacgtagtgaaaccgggtaagacaggtgctgacgaaatcaaggccatgatggacaacttccgtgcatgcccgccgaaagaattaggtggttcggaagtagtactggtgaaagactacaagacgttgaaggctaccgacaatactggaaaagctacagacctggatatgccggaaacatcaaacgtacttcagttctttacagccgatggtacaaaagtttctgtacgtccttccggaacagaacctaagattaagttctacatggaaatcaagggcgaaatgcactgtccgaagtgctatgcaggtgccgtagctgatgcaaaagaaaaagtagatgcagtgaagaaatctttgggtatttaagatgccgggcgtgtgagtgcgccgccaaagatagattgaaataaggaatgtcattcccgcaaaggctttcaggagtctttcttgctttgggaatgacatttcttttttttgttaaaatgcttgttctttgtgggtaattgctgacaaaaagtattgaattcgaaaaatctgctaaccgtagttttagacaaaatgttctatccgtgcatctgccttttgggaattgaaaatcttacctgtgctacagctgtctgtagaggggtagaagaggaatggaacggtcgttacgggagaatgaaaaatgaaaatccggaaaaatcgctttggcgttcggagtcaaacgcaaaggagttttgcctaaaacgtccttgcgtttttctgaaaactcttaggagttttggaacaaacgcacttatgtctttttcgcggaccttaaaatgaagacttttgaggactttattttctatttcaagcgggaatagaaaaatttttaaagtgactaaatgacgtttgttttaattatttattccctttttgcggataaaatatctttgttggtttctcctgtcttttcttgcgtaacatcctatttcttcttgatttttctaaactcattctccttcgcaggtacatacaaggataaaccctgagggttgaattttctttcttggagaagaaaaaatgaacaaaatgacagatgcatttctatggagaaatattgtgggaactctaaggtttatctatatattcgaatttaaacaggatggagcagtccgaaaatgcctggtgtcagataaagaaaaaggccggattctcaaaattgggaccggccttttagttttaggtatataggaactaatacctttggtaaaatatgattatttcagcattttctgagcttgtttcagcatcttttctgcttgttttactgcatctttcagttccttgctttctgcaccgttagctttcttctgagtcttttccagctgatcagaaagttgttttacgcgtgcttcagcttcttcttttgatacttcagctttctttgattttgccaaccattctttcataccctgtgctttgagtgaaagggtagcagtttcagcagccagttcggcagcggcttcatcttccggagtagcaaatgcatggtggaagcctttcacgtcgttccagtgtccgcgagtaaagtcggggaaggctacagctgcacatccgttgtccatagagatagctcccagttcggccaatgcacaccattcagccaagtcgtatacgtccatatccaatggcagaccgttctgcagacagtataccatacggctgtccatgatgaagtccataccaccgtgtccacctacttcttttgccatttcaccgtatttcttcaagataggatgctggtatttgttgaccagtgcttccatttctttttccggaaggaatgagtgagaactcaggttgtctactttcggctgtacgccagaagctttcatctgatcagcgtctacggcatagccttctaccggatatttattagcgaatccttttgttcctgtcagctgatacagacggttgtaaggctgaggattcattacgttgtgctggatttcgattactttaccgttttctgtacggataagtgtagtagtgtggtcaccgttacggaattcatcgcaaggttcgccggttgctttttctaccaatgcttttccgtgtactgattttgtatccattgctaccagggtagccatacggtcaccacggtgaatattcaatgcctgagctacagggccaaggccgtgagtagcgtatacgtcgccacggttttccttgttgtaacgcaagcgccatcccagtttgtcttcttttccgtttttccagtagtaaggccagaaatcatccaagttgtggatgtaagctccttgtgcgcggagtacttctccgaatactccctgctgtgccatgttcagggtgttcatttcgaaccagtcatagcagcagttttccagaatcatgcagtgcttgcgagtagtttcagacaggttgataagttcccagcactgttccagattcatagccgaaggaacttcgatggctacgttctttccatgctccatggcatacttggcaatcgggaagtggtgatcccagtcggctgcaatgtataccaggtcaatgtcttcgcgttcgcagagcgctttatatccttctgcacctgaatacacagctgcttcaggaagacaagctttctgcaggtatttctggcatttttctgcacgttctttttcatagtcacacaaagctacgattttagttccggcaatgtgagtaaaacgttccactgctcccggaccacgcattcccagtcctacgaaacctacgcgtacaacgttcattttaggtacagtcagaccgatgacagactcctgtccggctggacgttccggggattttattacgatggtacctttattccattcccactgagtggaaggtgaaaggctttgagcaagcagttgggcaggtgtacaagttaaggttaaaacggtgcaagcaccaacaatcatttttccaaaatgtttcatagctttagttgtttttaaagttgaattttaattggtggcaaagatataaaaaaacatcaatatccaaatgttttttctaaaaaacgcgtagatattaaaaaagaataagaattggaatctttaaatgaaataaaataaggtatatcaagatatattcttaaataaatagacgttggggtggggaagaacaataggatgaaaagacttagattcagaagttttacagagatgaatctgcctaaatttatgcgttgaatatgaaaatataaagatgataaactgacaacaaaaatgcggactttcttacgaataataatttatttgaaaaaaaagtgtcattttatttgcgtgttacaaaaaaccctttacctttgcatctgtaaacaaaaaacgagagaagacagatatgattacactgaatacattggtaaacctggcagtcctgcatattattcgcgtcgtggtcgtggcaccaagaggtgagaaggtttcgtgtatgtaatcatgcagttgtgataatatggaaagcctttctcaccagacgatgagagaggctttttaattaaagagtgaggaaaatgaaacatcagttacgtagttcgatgagcacggaaggtcgccgcatggcaggtgccagagcattgtgggtggccaatggaatgaaaaaggaaatgatgggaaaaccgattatcgccatcgtgaattcttttacacaatttgtaccggggcatactcacctgcatgaaatcggtcagcaggtcaaggcagaaattgagaagctgggatgctttgcggcagaatttaataccattgccatcgacgacggaatcgcgatggggcatgacgggatgttgtattctttgccttcgcgcgacatcatcgccgacagcatagaatatatggtgaatgcacacaaggcagatgcgatggtatgtatttccaactgtgacaaaattaccccggggatgctgatggcgtccatgcgtctgaatattccgactgtgttcgtgtctggtggaccgatggaggccggagagtggggcggacaacatctggatttgattgatgccatgattaagtcggccgattcgacggtgagcgatgaagacgtagctgaaattgaacgtcatgcttgtccggggtgcggaagctgctcaggtatgtttactgccaactctatgaactgcctgaatgaggctatcggtctggcacttccgggaaatggtaccatcttggctactcatgccaaccgtaagcagttgttcaaggatgcagccgcattgattgtaaagaatgcgtataaatattatgaggaaggagacgacagtgtgctgccacgcagtatcgccactcgtcaggctttcctgaatgccatgacgctcgatattgccatgggtggttctaccaatacggtgcttcacctgctggccgtagctcacgaagcggaggtggatttcaagatggacgacattgatatgttgtcacgccgggtgccttgtctttgcaaggtggctcccaatacacagaagtaccatattcaggatgtgaaccgtgccggaggtattctgaacattctgggtgagctggccaagggcggactgctggatactacggttcgccgtgtagacggtacgacactggcggaagctattgcaaaatatgcagtttgtgtaccggaagtcgatgcagaggcacagcgcatttattcgagtgcgccgggcggtaagttctgcattcagttaggcgcacagaattccacttataaggaactggataccgaccgtgccaacggatgcatccgcgacttgcagcatgcgtacagcaaggatggtggcttggctgtattgaaaggaaatatcgcacaggatggctgtgtggtaaaaacagccggagtagatgaaagcatctggaagttctctggaccagccaaggtgttcgattcacaggaagctgcctgcgagggaatcttggggggtaaggttgtgagcggcgatgtagtagtcattactcacgaaggtccgaaaggtggtccgggtatgcaggagatgctgtatcctacctcttatattaaatccaaacatttaggtaaagaatgtgcgctgattaccgacggacgtttcagtggaggaacttccggactgagtatcggacatatttctccggaagcagctgccggaggtaacatcggtaagattgtagatggtgacatcattgaaatagatattcctaaccgctctatcaatgtgaagctctcagatgaagaactggctcagcgcccgatgacaccggtgacacgcgaccggaaagtttcgaaggcactgaaggcatacgccagcatggtgagctcagcagataaaggtggagtgagaatcgtagaataaagagaggcttatgagtaaagaaaaaatatcaggttcggaagcattgatgcgctctttggagcatgaaggcgtgaagacgcttttcggttatccgggaggggctatcatgccggtatttgatgcgttgtatgaccatcgcgacagattgaatcacattctggttcgtcatgaacaaggggctgcacatgcggctcaaggttttgcccgtgtatcgggagaagtgggtgtttgcctggtgacaagtggtccgggggctactaataccattacaggaatagccgatgccatgattgacagtacaccgattgtggtgattgccggtcaggtgggagccggattgctgggtacggatgcctttcaggaagttgacttggtgggcgtgacgcagccgatttccaaatggagctaccagattcgccgtgcggaggatgtggcttgggctgtggctcgtgcgttctatattgcacgtagcggacgtccgggaccggtggtgctcgattttgccaagaatgcacaggtggacatgacggattatgagccggtaaacgttgatttcattcgcagttatgatccggatcctgaaactgattctacggcagtggctgaggcggttgccttaatcaatgcggccaaacgtccgttggtgctggttggccagggagtagaattaggtaatgcccagaaagagttgctgaactttgtagaaaaggcagacatcccgtgtggatgtaccttgctgggtttgtcggctttgccaagcaatcaccgcctgaataaaggtatgctgggtatgcacggtaatttaggcccgaatgtgaagaccaacgaatgtgatgtgctgattgccgtaggtatgcgtttcgatgaccgtgtgacgggaaaattggaaacctacgccaaacaggccaaaataattcatttagatgtggacccttcggaaatcggaaagaatgtggtggtagatgtaccggtgctcggaaactgcaaacgcactttgtctttacttactgaactgattcagccgcagaaacacgaggaatggattgcaagcttcaaaccatacgaggagaaggaattcaatcaggtaatcgaaaaagaagtatttccgaaagaaggccccattaatatgggtgaagtggtgaatgcagtcagcgaagctacccataatgaagcgattctggtgaccgatgtaggtcagaaccagatgatggcttgccgttacttcaaattcacgaaacctcgcagtatcgttacttccggtggtatgggaaccatgggtttctgtcttccggctgccattggtgcgacattcggtcgtccggaccgtacggtgtgtgcctttatgggtgatggaggtttgcagatgaccatgcaggaactgggcacggtgatggaacagaagtctccggttaagattatattgatgaacaacaattacctgggtaatgtacgtcagtggcaggctatgttcttcaatcgtcgctactcctttactccgatgatgaatccggattacatgcagattgcttcggcttatggaattgcttcacgaagagtgatgagccgtgaggaactgaacgacggcattcaggaaatgttgtcgaccgacggtcctttcctgttggaggtttgtgtggtagaagaaggaaacgtgttgccgataactcctccgggaagttcggtcaactatatgttaatggaatgttgagaggagaaggaggtgaattatgaatagcaacaagactttatatacaatcatcgttcattcggaaaacattgccggtatattgaatcagattacggctgtgtttacccgtcgtcagataaacattgaaagtctgaatgtgtcggcttcttccataaagggagtgcataaatacaccattacttgctggactactccagatgtaattgataaggtggtgacacaaatcgagaagaagatagacgtgattcaggcgcattatttcacggataaggagattttccagcgtgaagtagccatgtacaaggttgctactccggagtttcaggccaatccggaagcttcgaaggtgattcgtcgttacagtgctcatatcgtagaggtgaatcctactttttcaatcgtggaaatggtgggaatgagcgatgacatcacgtcgttgtatcaggagctgaaacagctgaactgtgtgttgcagtttgtacgctccgggcgtattgccgtttcgacaagttgctttgaacgggtgaatgagtacctggcacaccgcgaagaacggtatcagaatcaaaaggattgagatatgacagaggacagtaaagttggaacttaccggtttgtagccgaaccgtttcatgtggattttatggaacggctgactatgggcgtattgggcaaccatttgctgaactgcgccgggtttcatgcagccgacagaggatttggtattgccacgctgaatgagaatcattacacgtgggtactttcccgactggcaatagaactggaggatatgcctcgcgcatacgaaagtttctccatacagacgtgggtggaaaatgtgtaccgtctgtttacggaccgaaattttgccatcctggataaagacggaaaagccatcggttatgcccgttcgatatgggccatgatcagtatggaaacccgcaagccggccgatttgctgacattgcacggcgggtcgatagttgactatgtatgcgtgaaggactgtccgattgacaaacccggacgcatcaaggtgagtcatccggagctggtgggcgaatgtcaggtgaaatacagtgacattgacttgaacggccacgtgaacagcatcaagtacatcgagcatattctggatttgttccctatggaaatgttccgtgaaaagcgtatccgtaggtttgagatggcctatgtggctgaaagttattacggagataccttgagcttctatcgggagcagacaggcgaaaacgaatacgatgtagaggtgaagaaaaacggctcggaggtcgtagtccggagtaaagtgatttttagagattaacattatactaacaactagcagcttcaggctgcgtaaaaagattgtaagaaaattatggcacaaatgaattttggcggagttattgaaaatgtaatgacccgcgaagagtttccattggaaaaagcacgtgaagtattgaaagacgaaaccattgctgttatcggttacggtgtacagggaccgggccagtctttgaacctgcgtgacaacggtttcaacgtcattgtcggacagcgtcagggtaagacctacgacaaagctgtggctgacggatgggtaccgggagaaactttgttcagcattgaagaagcttgccagaaagctactataattatgtgtttgttgtcggatgcagctgtgatttctgtatggcctactatcaaaccttgtctgactgcaggaaaagcactgtatttctctcatggtttcgccatcacttggaatgaccgtacaggcgtagttcctccgacagatgtagatgtaatcatggtggctccgaagggttcaggtacttctttgcgtaccatgttcctggaaggccgtggcttgaactcttcttatgctatttaccaggatgctacgggtaaggcatacgaacgtaccatcgcattgggtatcggtatcggttcaggttatttgtttgaaactactttccagcgtgaagctacttctgacttgactggtgaacgtggttctttgatgggagctattcaaggattgctgctggcacagtatgaagtacttcgtgaaaacggacatactccgtcggaagcattcaatgaaacagttgaagagctgactcagtcattgatgccgctgtttgctaagaacggtatggactggatgtatgctaactgctctactactgcacagcgcggtgcacttgactggatgggcccgttccacgatgctatcaaaccggttgtacagaaattgtatcagagcgtgaagtcaggaaacgaagctcagatttctatcgacagcaactctcagcctgactatcgtgaaaaactgaatgcagaattgaaagcattgcgtgaaagcgaaatgtggcagactgcagtaaccgtacgtaaacttcgtccggaaaacaactgataaaagtcagtcgaaaataaatgcattggccgtccggtatccgaaagatgccggacggctttttttatttggatgaacaagagtctgtgatattttgtacctttgtggcaaccctataaaatgtatatgaataaatttgctattttgctgtcaggctttctttgcctggcaggggcggtgtccggacaaagtctggaacagaccacagagcaacgtctgaaagatttttttaccagttatgagacttcgtatgcccgtatcggtaagtgcaagctggaacgttttgaggtggagcatgagaagaaggtattgcgtgtatatgccaatccggcttttggctatcagccgtttacggaagaaaacgtgtcggctatctaccgtttgttgaagcagtcgctaccaggaccggtgaattattataccttgcaggtgtatgccgacggtaagctcattgaagacctggtgcctaatgcgtaccgcaagaaacaggacaagacgcgtctgtatggcaagctggaggcgaagggaaatccgtgggtgacaaatgtgtcacgtccgtatgaaatcagccggggactggagggacggcatatagccttgtggcaaagccatggcaaggtgtaccggaacgagcggaatgagtggcgctggcagcggcccagactgttctgtactacggaagacctgtttacgcagtcgttcgtggtgccttacctgattccgatgctggagaatgccggggcagtagtctttacgccacgtgagcgcgactggcagcgttatgaagtgattgtggacaacaatacctgcacaaaaggcagtcattatctggaagtggaagataaaaaataccgctggcaggataccgataaaccgggttttgcccagaaataccagcagtatcccgacaactataacccgtttacagacggtaccgcccgctttattcctactcaggggcagcctgaaaaagcctttgccgagtggattcctgatattcccgagaaaggaaaatacgcagtgtacgtaagttatcagaccctgccggagagtgtgtcggatgccaagtacctggtgttccataacggcggggtgacggaatttaaggtcaaccagcagatgggaggaggaacctgggtatatctgggtacctttgaattcgataaaggacggaacgactacggcatggtggtgttgagtaacgaaagttcccaaaaaggagtagtttgtgccgatgcggtccgttttggtggcggtatgggaaacattgtgaggggcggacaagtgagcggagtaccccgttacctggaaggagcgcgctactgggcacagtgggccggaatgccttatccggtatacagcaagagtgaaggaaagaatgattatacggacgacatcaatgcccgctcgctgacggtgaattacctgagtggcggttcggtatacaatccgacagaagaaggattgaaggtaccgtttgaaatgactctgggtttgcacagtgatgccggattcaagactgatgatgaactggtgggttcgctgggtatctataccacagatttcaatgacggaaagttgaacagtggggtatcccgttatgcttcgcgcgacttgactgacatggtactgactggattgcagcgtgatatctcttcccgttttggcgtgcagtgggccagacgaagcatgtggaaccggaactacagtgaaacccgtctgccggctgtgccttccatgattctggaattactctcacaccagaattttgccgatatgaagtgggggcataatccggatttcaagtttacggtgggacgctccgtgtataagtccgtgctgaagtttctctctaccatgcacggtacggactatgtggtgcagccgcttccggtaaatcactttgccatccgtgaaggaaagaagaaaaatacctttacgctgaactggaatccggtggaagatgtgatggaacccactgccaagcctcagggatacatcgtctatactcgtgtcggttatggcggattcgataatggggtgtatgtgcgcaagccggaatatacggtgaaagtggagccgggactgacttacagcttcaaggtgacggctgtgaaccggggaggagagagtttcccttccgagatcctgtctgcctataaagccaagagaagcaaaggtaccctgctcatcgtcaacggattcgatgccacgtcgggaccggcagaagtcaactctgctttgttgcaagggttcgacctgaaagccgatccgggcattcctgacggacagacacctgcttattgcggataccagcagggattcaaccgcgacaaagccggactggaaacgggcgacgggctgggagtaagtgatgatgtcttggaaggaagactgattgcaggcaatacccgtgattatgtattcgtacatggcaaggccattcagcgtgccggacgctattcgttcgtgtcatgcagcgatgaaaccctggaaagtggaagtaccgatttaactcactatgacatggtcgatttgatttgtggtgccgatgccaagaccttttctgcttccatgcgagaagcactggccggttattgccgtcagggaggccgtttgctggtcagcggttcgaagtggggagagaatttgcagaaagacgatttcggcaagaatgtgttgaaatgcacgtacggaggtcgtttcagtaacctttcttccgctccggtgaagggagccggtacaagtttccgtattcagggcggagctaatgaaagcatttacgctgttccatccatggagtgtgtgatgccggtggaaggagcttactctgcgtttgcctataccaatggaaattacggtagcggtacggtttatcgtggagaagattatcgtacttttgtgttgggattccctttggaatgtgtggagaatgcagacgttcgcacttaccttatgcagactattgtacaaaccctgttgtccaaaaaacggcggtagggcagattataaaaaaggaatgtaatattaagaataaaaacaagagtgacaatatggaaaatgattttttgaaagtaattgaaacacgtcgtagctgccgcaagtataaaccggagcagattacggatgaagagttgaaagccgtactcgaagccggtacttatgcgccgacctcacgcggcatgcagtcgccctacattgtggcagtgcagaagaaggaagtgcttgcccggctggcaaaaatgaatgccaagattatgggagtgacttcgaacccttattacgatgcgcctacctacgtgctggtgtttgcgccctcgctggccaacaatccggtgcaagacggcagttgcgtactcgaaaatatgatgctggccgctcatgcgctgggactgggtagctgctggattcaccgcgaacgggaaatgtttgctacggaagaaggcaagcagttgatggaagagtggggccttccggaaggattgatgggaatcggtgccctttctttgggttatcctgatggagagtcggctccggcgaaaccccgcaaaccggaatatttccgggtaataaaataaggcataaaaaaacgcaaggacgtttcactcaaaatgtccttgcgtttgcttttaaacgcccttgcgttttccctaaaacgtccttgcgtttggtttcaaacgtcgaagcgtttgaagtgtactgaaaatagttgtcagtttgaagattaattcctgacaaagttgacaggttaaacattatattcctaaaa

SEQ ID NO: 3756 - DNA, 178228 bp, Unknown
  gut microbiota DNA sequence
aagacagacattctgcctttgaatactttcgatttttacgcatgttactaaataaattgtgtcaacttatttagtacactacaaacgcaaggacgttttcagtcaaacgtccttgtgttttttttaggtcgttgaaatatgttctttaaaacagttctaaaagcctttcgaaacgttcatttacaaggagttttaactggaaaaagggtaggcagataccttaatgggggctgtgaggccaaagaagtttgtcacttttttcaaaaaaagatagtcgataattttggtagtttcgaaaaaaagactacctttgcactcgcaatcgggaaaatgatgaacggttgtagaagtaatgcggaaatagctcagttggtagagcataaccttgccaaggttagggtcgcgagttcgagtctcgttttccgctccagcaaaagaaaagagttgcgcgaaaaaacaatgcccaggtggcggaatggtagacgcgcacgtttcaggtgcgtgtgtcgagaggcatgcaggttcgagtcctgttctgggcaccacgaaaacaattcttttctttttctttttggaggaatggcggaattggtagacgcgccactttgagggggtggtgacagttatgtcgtgtgagttcgagtctcatttccttcaccgaaaatgcggaaatagctcagttggtagagcataaccttgccaaggttagggtcgcgagttcgagtctcgttttccgctccagcgtttgttgcgcgaaggtcgaaagaccgtaatgcccaggtggcggaatggtagacgcgcacgtttcaggtgcgtgtgtcgagaggcatgcaggttcgagtcctgttctgggcactatattttgcggaaatagctcagttggtagagcataaccttgccaaggttagggtcgcgagttcgagtctcgttttccgctccctttagttttgaaatttttgcggaaatagctcagttggtagagcataaccttgccaaggttagggtcgcgagttcgagtctcgttttccgctcgcaggagaaagcaacgcaggttgttttctcttttttttatgcatttttcttgcaggaaattttttgtatatctgttgcgggtattatgaggaatttgatatatttgcgcctgcaattaagaaaatgaagaaacatgacaacgtatgatatttatttctcggacggcagttcgagcgacaataaggggttttctatcaagactcctgaaaaggccattcacatggcggaagacatgttggtgaaaggcaacagctacattgaagattacgcaggcggagtgatttcggtcgtatcttccggcggagagaccgtatggagcagcccgattcccgagtcgaaaaagaaatgacacagtttatatttttaaaaccataagattatgttttctggaatagtagaggaatatgcagaagtcgtgaaggtggtaaaggatcaggaaaacctgcacctgacattgaaatgttcgtttgtggatgagctgaagattgaccagagtgtatcacataacggagtgtgtctgacggtagtcagcattcaggacggtacttatacggtaacggccatgaaggaaaccattgaacgttccaatatcggcctgctggctgtaggcgacaaggtgaatgtggaacgcagcatgatgatgaacggacgcctggacggccatatcgtgcagggacatgtggaccagactgcagtctgtacggcggttgatgatgcgcagggaagctggtatttcacctttaagtataatttcgacaaggagatggcaaaacgcggatatttcacggtagataaaggttctgtcacggtgaacggtgtcagcctgacagtctgcaatcctacgtcggatacgtttcaggtagcgattattccttatacttacgaacataccaatttccatacaattaaggtgggcagtgtggtaaatatcgaattcgatattatcggtaagtacctgagccgcatgatgcagcttacagagtgatactttcagttatataacttcaaggcgcagctttctggaacgatttccgaaagctgcgccttgcgttttttataggtctttgagcagtacctcgctgctcttttctgtaaattctttgcgggcctgtatcagggtttgccaggctgtagaataatgtcctgggtcaattttgaaatcctccgctccgttggcatccagctggctgaggagggtgcctacacttaactggtggatgtcgattccagggaggtattgagggtcgcgggatttttcttctccgccggcaccggcttcataaatcagtcgcatgtcctgcaactcatacagaatactttttgtcagacggattggaatcttgtgttctttgcttagtgcttctgccgtataaggtcggccgccggtggcgaatcgtttgcagatagagctcagaatgatggtacagaaaaagtcgtggaagcgtcggctgatgttggctgtttcctttccgaagttgaaggtggatatgttctggctgatgtagctcatttcggctccgaacaggcagatgctccaggatatttgtgtccacaaaaggaacagaggaatggcagcaaagcttccgtaaatggcattgtaattagaaacccatatctggctgttgatgtagaaatactgaaaggcctgaaaagcgcttccggccagaatacccggtagccaggcatgtgctaacttgactttcgtgttgggcatgaaggtgtaaagtccgataaacataccccagataagggcataggggataaggcggacgaaaaatttcagtaccggagccaataccatgaagttctgcaattccttgacgtaggtgctcatgaagatggacagaccgctggagattacgagtagtaccggcagtagtagaatcaaagaagaatagtcagtaatctgtcggaacagacttcggggtttttttacttgccagatggcattaaagctgcgttcgatgttgtcaatcagcagcaggacagtacccaacagcatgatgaggcctacaccgataaagatgccgctttgtgcatgttccagataggaattaatccagctgatgacaagttcagcctgtgcgcctgttaccccactgcggaactgtgattcaatcagggtatcaaaaccgaatcctctggcaatagcaaaaagaagagctaagatggggatgatggaaagcagggtgctgtaggtcagtgctgatgcacgcaccacaatacggtcattgataaactggttgatagataagtaaataatcttgagacaggtgtatcctttccattggaggtgagaaacttcctcttcccggatgcgccagataccgtcgtccagaaagtgaatcagtgatttgagtcgtgcgttcatggtggattggttttaatgaaaaagaaagcagccggtctataagccgggttctgtcaccctgcaagcaggggagtctgtcatttatctactcctgccgtcaccggcaggctctagcggtccaccctccgacgtggggcgagcaaccctcgttaatgccggtttacatgaccttacaactcctaagatgcacagcccgcatatcgctatacggctggtaggatcttaccctaccttctcacccttacctccgggtggaggcggttattttcttctgcattactctacccttacggacagctttctgttaggaagtaggatgctctgcgttgcccggactttcctcttttactatataataatgtaccagcgacagaccgaccgactgctttcttcatgcaaaggtacgcaaataaacggaatttgtgctataattgtcaggattcttttgattcgggtgtttcggggagctgtcagaacgggccggacgaattgtcagcgttgtcactatttcactggtaatgaatgtaaatttgtcagatatgccagttaactgcggttaatgcccttgttttcattgttaaaagacggaaaaaagaatagggtaagagtacaatcgtatggattttgttctactttagcaaatgaaaagttaaaacaacgtcgaaattaacatttaaaacaatagaagatatgaaaacaacaactaagtttgcgattggttctgtggcagtcgttgctttgagtgccggagtggcaggggttacagcgtatgccatgatggagaaaaatcaggataatacttctttttatgaaagttttgaaacggcatctcctttacgtaccgcagcgttcgatgcttccagcatgcagccggtagacttgactaaagcggcagagagtacgttgaattccgtcgtacatatcatgtctatccagcgcagcaagatacagactattcagggacaaccggatatttttgacttcttcttcggtgacggtagaggacgtcagcagcaagtacagactccggaacagagaggtttcggttcgggtgtcatcatctcaaaggatggttacatcgtaacgaacaaccacgtgattgacggagcggatgaaatcaacgtgaagttgcacgacggacgcgaaatgaaaggtcgtgttatcggtactgacccgactactgacctggcacttgtaaagattgaaggagatgacttcccggctatcgtggtaggtaactctgacaacctgaaagtaggtgagtgggtattggcagtaggtaacccgttcaatttgggttctacagtgactgccggtgtggtaagtgcgaagtctcgtggactgggagctaatcaggtagaatctttcatccagaccgatgcggctatcaatcagggtaacagtggtggtgcattggttaatgcaaaaggtgaactggtaggtatcaatgccatgctgtattctccgactggtgcttattcaggatacggtttcgctattccggtaagtatcatgacgaaggtagtaaccgacttgaaacaatatggtaccgtacagcgtgctttgctgggtatcggcggtcgtgacatgggtgatgaaaggtatccggatgaaatcagaaaagagcagaaagaactgggagctactgaaggtgtacaggtagtcgaagtaaccgaaggtggttctgccgatggattcttgcagaagaacgatgtcatcctgaagttgaatgacaagactgtgaagaccatggctgaccttcagggaacattggctaagtatcgtccgggtgataaagtgaagatcaccgtattgcgtgacaagaaagaaaagacctttaccatcacgttgaaaaactctcagggaactactaaagtggtaaaacaggcagatatggaacttctgggagcagccttccgtgccgtacctaatgaactgaaaaaacagttgaacttgggttatggagttgaagtgaccggtattgataacggaagaatgaaagacagcggcatccgcaaaggtttcattattctgaaagccaacggcaagcagttgcgtaccgtgcaagatttggaaaatgtaatgaaagcagcttctcagtcacccgatcaggtactgttcatgacgggagtttatccttcaggaagacgtgccaactatgcggtagacttgtcgcaagctgaataaaagatattactgtaaggtaaaaagatttggaaagaaaaggcgttccgatttttcggaaacgcctttttgatgttttttctttctccgataatatgggcgggagatgaacaattgacttgttttgtctgttgtcatttttagaatggcggttgacaaaaagagagcaggtccgtctgtttaagaaaattatagattctttctttgcaaatctgccacctaaataaaattaattttgtacttttgtacccaaatcattttatatagaatgagacagttaaagattactaaaagtatcactaaccgagagagtgcttctttggataagtatttgcaggaaatcggtcgtgaagatttgattactgtagaagaggaggtagaactcgctcaacgtatccgtaagggtgaccgtattgctttggagaaacttacgcgtgctaatttgcgatttgtggtgtctgtggccaaacagtatcagaaccagggattgagcttgcctgacttgattaacgaaggtaacctgggcttgattaaagctgctgagaaatttgatgaaactcgtggattcaagtttatcagttacgccgtttggtggattcgtcagtctattcttcaggcactggctgaacagtcgcgtattgtacgtttgccgttgaatcaggtaggctcactgaataaaatcagcaaggcgttttccaagtttgagcaggaaaacgagcgtcgtccttcaccggaagaactggccgatgagctggaaatcccggtagacaagatttcggatacgctgaaggtttccggtcgtcacatttcagtggatgctccttttgtggaaggagaggacaacagtctgctggacgtgctggtgaacgatgattctcctatggccgatcgctccttggtaaatgaatcactttcgagggaaattgacagagcactttctacgctaaccgaaagagaaaaggatattatccagatgtttttcggtattaacacgcaggaaatgacgttggaagaaatcggcgacaagtttgggctcacacgtgagcgtgttcgtcagattaaggaaaaggcaattagaagattaagacaaaattctcgtagtaagctgctcaaatcttatttgggataaggtagagattgatttccaaaaaaacagaagagatgtatgaaggttagctcagaccttgatacatctctttttgtatgtagaaaggctttttctttgttaatttatatgtcttctttcggtttttacgcataattgtgtacttttgcccccaataaattgatgaattatgcgttatacaaagtttttttgttttctgttaatgatggtatttgctgcttccgcattcagtaagcagccgaaagataagaataaatatggagtgtatctggctggtgtgtctgcttcatttactgactcattagtgtatttcacagacgtgcagtatctggacagtgctgctgtagatgataaaggaatgttagtgggccgtgcattgtacagcatccagttgaaggactatctggaacagaaacagaatggaaagaaccgtacttgcttcatgttttttagccgtaaaaagaaaaacgtgcagaaggaactgaagaaattgaaggaaaaatataccaagggtggttcattgttccttcaggatgtgaatgcggaatttaagtttgaaaagcctgattttgaataatgcagatgaagaaatggctttacaccctgttggtgatcgtactggccgcctgttccagtgaaattccggaacaacagcctgcgaaacgctccgggcgtacggtattggcttatttgatttcaaataatgcaggaacttctttagataacgatttgcgaaataacgtaatcgatatgtatgccgcattgggcaatatgaaagaatcatgcacattgctggtattttatcgtccttatgcagatgatgctcccttgggtaagcctactttaatgagtttctatgccgacggacgcggcaatattaataatgtagcagctttgacaggtgcagagctgacttttgatgcggtctgccatgtagctcagaaaaaagagtataccatgaacagtcagattgcaaccgatccggccgtgatggaggaggtgtttactgatatgcagaagatcgctccttctgatagttatggtcttattttaggttcgcatgccacgggatggatgaagggtaattctgtgcaatcaaaagcctttggtgatgacggtggttacaatatagatattcctgatttggccaatgtgttgaagaaaagtttctcggaaaaattggatttcgtgctgtttgatgcctgtatgatgggtaatgcagaggtgggctatgaattgaaagacgtaacttcacattgtattgcttccgtaatggagaccccggtgtatggattcccgtatgatcagattcttccttatttgtatactgaaaatatagactattctgctgtttgtcatgagtttatttctttcaataaaacaaaggatgtttgggggacatgtgcagtgatggattgtagccaaatggaaaatctggccagtgcggtaaaagcaaaactctcagagtggcaggatgcgctttcttctgtgtccatgcagaatgtacagcagtatggagcttatggatgggggcgtgattatcggtacttttcttatgatttgcttgatttcttccgtgaactaggacggaagagtggagtgaagaatttagatttgaatgaagctgtgtcaactgtgcagtcggccctgaatcaggctgtgatagctaaagattgcttgtcaggcactgactatgaatttgatggagtcatagttgatgaagcccgtttttgtggaatcggtatgtatattccaaaagaatataatccttatgttgctaataaaacagcttggaatgattactacgagcaatccatctcttggtatcatgcggcaggttgggccgatttaattttgaactaattacaaatttctttactctttgtgtgaacattctatcggctaagtgtgtttttatttattaaaacagctttataggtatgtggaatttcatcaaagaattacgacgtaaggaccaccagcgttatcttggtggactggatttctttaaatatattggtcccggtttgcttgtgaccgttggttttatagatccgggaaactgggcttctaattttgcggcaggagcagacttcgggtactccttgttgtgggtgattaccttgtctactattatgctcattgtgttgcagcataatgtggctcatttgggaattgttaccggactttgcttgagtgaggctgccacgaaatatacgccgaaatgggtgtcacgtcctatcttgggaacagccgtattggcatctatctccacttctctggctgagattttgggaggagccattgccttggaaatgttattcgatattcctattatctggggttcccttctcacggcattctttgtcacaatcatgctgtttaccaattcctacaagcggattgagcgctctattattgcatttgtgtcggtgataggactatcatttctctatgaacttttcctggttgatatagactggcctttggctgcccgttcgtgggtgacgccttctattcccgagggtagtctgttggtgataatgagtgtgctgggggccgtggtgatgcctcataacttgttcttgcactcggaagtggtacagagccgggaatacaacaagaaggacgatgcttctatccgtaaattattaaaatatgaattctatgacaccctgttctctatgggagtaggctgggctatcaacagtgcgatgattttgctggctgcggctaccttctttgctaaccatattggagtagaagagttgcagcaggccaagagcttgttggagcctttgcttggcaatcaggctgctactatctttgctcttgccttgctgatggcaggtatctcttccactgtgacaagcgggatggctgccggttccatttttgccggcatgtttggtgaatcctaccatgtaaaggatgtgcactctcgtgtaggaattctactttcattgggaattgcactggttgtcattctgttcatcgagaatcctttccaaggattgatcatctcacaaatgatactgagcattcagcttccgtttaccattttcttgcaggtagggttgacctcctctaaacgggtcatggggcaatatgccaactcccggtggagcagttttgtgctttacaccatggcagtgattgtatctgtgctgaatctggctcttcttttctcagaaagcttttaaactgtccgtaaatcggtgcctgacatctttttcttatagtggtatgccagcatcaaggctgccacggcgaaggccaaggcatcggataacggcatgctgaaccatacaccttccacgccatagaagggtgggagaaaagccagtcccggaagaaggaagagcagctggcgggaaagagacaggaagatggaaatccgggcttttccgatggactgaaagaactgggtgatgacaatctgtgcacctaccaccgggaagaatagaatgccaattctcagggccagtgtcgcttcatcagtcagttcgtggttgtcagtaaacatgccgacaaatataccgggaaacagctcaccgattataaatcctaaggtagtaatgatacatcctgccgtgattcccagcttcaaggttctttttacgcggtcgaaatgttgtgcaccgtagttgtatcccgtgatgggctgcattcccatggtgatacccattacaatcatgacaaagagcatctggatacggttaaggatgccgaatgcaccgattgccatatcacctccatagttgagcagacggttgttgatgaaaatcacgatgcagcaggcacacacattcatgacgaagggcgacatgccgatggcaaaaatattggctatgatgtgttgtttcagtcgcatgctgtgacgctggaagcggatataagtcttcggactgtagaagtgatacaatacccacagcatgccgatgaactgtgagcagatggtcgcaagtgccgctccccggattccccagttcagtacaaaaatgaaaatcggagccagaataatgttgcagcctacggtcagcatggaagaaagcatggcttttttcgggtaaccggtggcacgcatgatgttgttaagcccgatcatgacgtaagaaatcggactgcccaataaaattacctgcataaaatcgcgggcatacggcagggtagcttcgctggctccgaagaaaaagagaatcggttccagaaagataaatgccaatccgccgtagaagatggcattaatgacacaaagaatggctacgttaccgagaatatcttctgctccctttttatccttttgtcccagtcggatggaagaaagtgtggcacctcctacgcccaccagtgtacagaaggctaccagcaggttcatcagcggaaaggtaatggccagaccggagatggccagggctcccacaccatgaccgatgaaaatactgtctatgatgttatacaaggaagtcagtgtcattccgataatggcaggaatggaatattctaccagtagtttcccgataggggcttctcccaatatgtgcggattgttttctttcatgtacgtttgtttattttaatttccaaagttaggaatatgaagcaatattttagaactttgtaccgttaaatcaaactaaacataccaatggacaaaactaaatgcgtagcagcactttttgattttgacggagtagtgatggacactgagtcacagtacagcatcttctggaatgaggtgggaaagaaataccatccggaatacgaggaattcggaaaaatcatcaagggacagacgctgcggcagatttacgaccgttattttcagggaatggagcatgaacaggctgaaattacagaaggcttgaaccgtttcgagacagagatgcgctatgaatatgtgccgggagtggcagagttcatgcagagtcttcgtgctcatggagtgaaaatagccatagtgaccagctcgaacgagaagaaaatggccaatgtgtatgcggcacatcctgaattgaaggacatggtggaccggatactcacagccgagatgtttcagaaatccaagccggaccccgattgttttttgcttggagcaaaagtttttgaaactctcccggccaattgcgttgtgtttgaagattcgttccatggcattcaggcgggaaacgcagcaggcatgcctgtagtgggactgagcaccaccaatccggcggaagccattcaaaatcagtgcgaccgggtgattccagatttcacctgttttacgtatgaagagatgatgaacttgctgtaaggcttgtctgattcggaaaaatcggctatttttgcggaaattttattaattcagaagaaaactatggcaggatatctttctggtgatactcgtaaggtaacgactcaccgtttgattgagatgaaacagagaggtgaaaagatttccatgttgacctcttatgattatacaatggcgcagattgtagacggcgcaggtgtggatgtgattctggtaggtgattcagcttcgaatgtgatggcgggtaacgtgacgaccttgcctattaccgtggagcagatgatttatcacggaaagtcagtgatgcgcggtgtgaagcgtgcattggtagtggtggatatgccattcggttcttatcaggcagacccgtttgacggggtacgcaatgctatccgcatcatgaaagaaacacatgccgatgccctgaagctggaaggcggtgaagaagtcatcgacgtgattcgccgtatcatcggtgccggaatgcccgtgatgggacacctgggactgatgcctcagtctatcaataaatacggaacttacggtgtacgcgccaaagaagacgcagaagctgaaaagctgatcaaggatgcgcgtctgttggaagaagccggatgctttgctctggtactggagaaaattccggctgcactggcaacccgtgtggctcaggagctgactattccggttatcggaatcggagccggtggaggagtagacggacaggtattggtagtgactgacatgctgggtatgaccaaaggattcagcccgcgtttccttcgtcgctatgctgacctgaataccgtaatgaccgatgccatcggacattatgtagccgacgtgaaagcttgtgacttccctaacgagtcagaacaatactaagattatcacttataagccgcagatgcatggactgcaaagtccggttcttccggacaatttaaaagtcgcagtctgtgcatctgtgttttctattagatgtagaaaaaatgtggaacaagaattttaatcttttgctcatcgctaattttttcctgtatacggcagtgtatatgctgtttcccgcacttcatcattggatggtgtcagaaggagggtatacgggatttcaggccggaggggccatagccatctttggagcttctctctttcttttgggagctttcaataattacctggtcgatacgtttaagcgtaagaatgtgtgtacgcgcagccttctgctgctggcgcttttgggattgttgtatccatacgccggagagtgggggatgattttccttttgcgtgtgcttcagggagccttgtttggggtggtactgatggccatgggcagtaccctggtcatcgatgtaactcccagccagtacagaaacaaggccagtgtggttttcacctggtcgggggtactcggtatgctgtgcggcatcctgttgggatataatgcaggctggtatctttctttccagcagcagatttatctttttgtgggactttgtgcccttccggtcgtactggtttccatggtggaagtctgtttccgtgctccgttggaccttccgttgctgtcgttcgaccgttttctgcttttccgtaccttgattccggggctgaacatgatggtggttcccttcattttaggggtgctgttcagctcgattttcgatacttttttctacatttgtatcatagccggatttatcgtcttcctgctgctggaccgcgtggttcgcaagcaagtgaacggccgcctgctgaatggtgtcggactggtattgatgtgcgtggcagtatggctgctgggctgttccaccgaaaaagaaatgctaatgggagccggtcttctgaccggattgggcatgggattttctctgcttcagttcttgcggatgatgatacgtcttcctttgcactgtgagcgcggaacgggctatcacacctatcagttgctttgggagtcgggcgtcatgctgggcgtgttcttcggaaaatacacagaagacagctccggacaacagttccgggctgcatcgctcattttgctggctggtctgttgatttatcaggcagtggtgcacggctatttcatgaaacgaatgaagaatagataacttaactaatataaagaatatggcagacgacaagaaaattatcttttcaatggtgggagtgagcaaatcattccagaacaacaaacaggtattgaaagacatctacctatcctttttttatggcgcgaaaatcggaatcatcggtttgaacggttccggtaagtctactttgatgaaaatcattgccggaatcgaaaagaactaccagggtgaagtggtattttcaccgggctattctgtaggttatctggcccaggaacctcagcttgacgacacgaagaccgtgaaggaagtcgtgatggagggagtgcagcaggtggtagacacgctggccgaatacgaagaaatcaatcagaagttcggtttgccggaatattatgaagatccggaaaagatggacgcactctttgcgcgtcaggccgaactgcaggatattattgacgctaccgatgcgtggaatcttgacagcaaactggaacgtgcgatggatgcattgcgctgtccgcccgaagaccagctggtgaagaacctttcgggaggtgaacgccgccgtgtggctttgtgccgtctgttgttgcagaaaccggacatcctgttgctcgacgagccgaccaaccacttggatgcagaaagcattgactggctggaacagcacttgcagcagtacgaaggaacggtaattgccgtaacacacgaccgctacttcttggatcatgtggccggatggattctggaacttgaccgtggtgaaggtattccttggaagggaaattattcaagctggctggagcagaagaccaagcgtatggaaatggaagagaagacggccagcaagcgtcgtaagacgctggaacgcgagttggaatgggtgcgcatggctcctaaggctcgtcaggccaagggtaaggctcgtttgaattcgtacgacaaactcttgaacgaagatgtgaaggagaaggaagaaaagctggaaatctttatcccgaacggtccgcgtctgggaaacaaggttatcgaagccaagcatgtggccaaggcgtatggcgacaaactgcttttcgacgacttgaacttcatgctgccgcctaacggtatcgtgggagttatcggtccgaacggtgccggaaagacaacgttgttccgcctgattatgggactggaaagtgtggataaaggcgagtttgaagtaggagagactgtgaaagtggcctatgtagaccagcagcacaaggacattgacccgaacaagaccgtataccaggtaatcagtggcggtaacgacctgattcgtatgggtaaccgcgatgtgaatgcccgtgcatacctgagtcgctttaatttctctggttctgaccaggaaaaactctgtggtatgctttctggtggtgaacgtaaccgtctgcacctggccatggcattgaaggaagaaggtaacgtgttgttgctcgacgagccgaccaacgatattgacgtaaacactctccgtgcgctggaagaaggtttggaagactttgccggatgtgccgtagttatcagccacgaccgttggttccttgaccgtatctgtacccacatcttagcttttgaaggagacagtcaggtgttctacttcgagggttcttacacggaatacgaagaaaataagatgaagcgtatgggcaatgtcgagccgaagcgcgtgcgttatcgcaagttgatggaagattaattttctttaatcgataaataaaaagaagcctctggcaaggaaacttgctggaggctttaagtttttcagatattttttgtacatttggggtatagtttatgagttcttataatggttggaggcattgaaaaatgataacacatcctatatatagttattcgctttgcatcgccttgccgttgatgctgtttttcggcttttattttatttttgccccggtgccggacaaagcaatctttagcaattatcttcgttcgcgtagggtaatgggatttgccgtgctattgttggctgccaattattccgtacatttctttgcagaaatccgtttccagaatgtggatgcagccatcttgatgaatctgtctacctatttcctttgttactggcttttcagttcggcgcttactacattgcttgatcgtttctatattacgcggcggcgctttatggtacatgtgtgtcagtggttgctgtttacagccttgtcgggggtggtactattaggattgccaaaaggtttgattcaaaaaatgggtattctggttatgtgcgtatggctggtaacgtatggatttgttctggcacgccggcttattctggcctatcgtagagcagtacgactgtgtgatgatacccattctgataatgtgggtgcttatatacagtggttgtccatttttacttattgggcggtgatttttggagtagggtgtggcctattgaccttccttcctgacaaatatgtgtatatctggattctgtcgtctgttcctttttatatttatctttattgctcctatatgaactatctgttgttctacgagcaagtggagcaggtcttcgagtcagaaatgccatcggaaggagatgtttcagctatggcgataggggaaatgcaggctcttcctcctagtttctctgacattgcagaaagactggctgtctggatagaagagaagggctatcttaaattagggctgacactgaaagagctttcagaaatactgaagactaaccgtacttatctttccagttatattaagctggtttatcagttgtcattccgtgaatggatttccagtcttcggttggaatatgcaaagactatgctgaaggaatgtccggaattgacgattgctgaaattgcagaaaagtcaggtttccagtcggccagccatttcatacgtctgttcaaagaaaaagaagagtgttcgccagcccgttggaggaagaagtaaatcggtagctgtacacaaaaatgcattgaataaagaaatgagaatgctttgaatgagacagatggaatatcctgtcaggaattgcaatgaattttaaataatcaggggtaaatattggctcttggatatttttcttatctttgtataaaggcttgaatcaaataagcatttgccgttccccgttattcattattaattgtttagtatgaaatatccaattggaatacaaaattctgattgcatcatggaagacggttatttcatcaactggaaacaagtataaatagaaacacattaactaatatggaaaagaaaataccctttgcttctgatgtaattttgattgatgcagctttccttgaccgtgtggggaaggatatggcggcacatttcgcaccgttggtggggcgtgaactacctaaggctgatttggccgtgttgctggagtgcctggttttggatgccggaattgagccgggcaagaatgagatacaggtaatttttgtgtatgatgaggagcatagccggatgaatttctgccttccttccgatttggaaaaagaggttcacggtatggcattccagagccgcctgggcgagtttgcgctttatgctttccagccttcggatatggcccgtcgggaggacttgtttacggaatcactgcaactgctgaccgaatcgaaagatgcacgccgaatcatgctggtgcccgatgaagagggatatgggactgctgtggagcagcaggcagcaaagataaagggaaaagatggtgtgacggtgttcggtatgaatcctccggcacacgattatgaatattcctttgaaatgttaggatttgccattcttcagtcgttgggcatccgggcagaggaactttaatctttgtggaggcatgtcggatttccgtttgaaagctttctatagtgtggcacgaaaccttagttttaccaaggcttcgcaggagttgtttgtgagtcagccggcagtgaccaagcatgttagggaactggagagtctctatggtgtgcgtctgttcgaccggaagggaaattccatttcgctcactgaggctggaaaattgctgatggagcactgcgaacggattttggacgattaccgcaagctggagtacgacatgcaccagttgaacaatgagtatgcgggagagttacggttaggggccagtacgacaatctcacagtatgtgcttccgcctgtgctggctgctttcacggagcgttatcccaagatgagtgtgtcattgatggacaccaattcgcgcaatgtggagaaggctttgcaggagcataccattgatgtgggtatggtggagggagtgttccgtctgcccagcctgcgctacgacccgttcttgtgcgatgaactggtgccggtagtttgtccgcgcggccattgggccggaaaggaggaactgacgctggaagagtttgttcgtgtgccattggtgcttcgtgagcgaggttccggcacgctggatgccattgagatggtattggcagagcaggggctgaagctttcttcgctgaacgtgcggatgcacttaggcagtacggaaggtatcaagtcgttcttgcggtgcagcaactgtatgggtatcgtgtcaatctgtgctctcgagagggaactgaaggaaggagactttcaggtgattgacattgagggcttgcaattcaagcggcatttctgttttgtatcggctcagggacaggagtcggatacggtattgaattttatgcgttttgtccggcacttcctttccggaaagtaaaggccggacaaaacgtgtctttttatttctttccgaattcaggatcgattttcagcagggcggtaacgccgaaggtggccagtgtgcacaccataatccaaatgaagaacagctggtagcctaaggtttcttgcatccagccggctatcatgcccggcagcatcatgcccaaggccatgaaggcggtacagatggcatagtgcgaggtcttgtgtgtgccgttggcaaaataaataaggtagagcatgtaggccgtgaatccgaatccgtagccgaactgttccacaaagatgcagctgttcacgatgattaagttgtcgggctgggcgtaactcaggtacacatagacaatatcgggcagggagatggcccataccatcggccagagccagcggcgcagtccgtggcgtgctacggcaatgcctcccaggatacctcccaaggtgagaccgacaatgccgagcgttccttgggcaaagcctatctgtgccgtggtcatgccgagtcctccttgttccactgggtcgagcaggaagggaatgcccatcttggctaactgtgcctcgggcaggcggtagagcagcatgaacagaatggcggtaagcgcctgttctttctggaagaaggaacggaaggtgagcaggaaatcggtcagtatgctccgggcttctccttgtcgggcgaccgacggacagtcctggtcaggacagggcagtacgaaggaatggtagagccacagagccagcaggcagcctgctaacgtgaagaaggtgatgctccaggcgtacgatgtgcgtccggtcatttcttccagccagccggccagcataatgagcagtccttgtccggcgatggtggcaaagcggtagaacgtgctgcggatgcccacgaagaaggcttgctgatgcggggtaaggcctaacatgtagaagccgtcggcggcgatatcgtgggtggcagaactgaaggctacgagccagaataccgccaatgtggtctggaagaaatggctggtggggatggtgaaggcaatgccggccagtccggcacccagcagcaactgggtagtgacaatccaccaccgcttggtgcggagcaggtcgacaaacgggctccacagaggcttgatgacccagggcaggttcagccagctggtgtagagggccacctccgtgttcgagatgcccattcgtttgtacatcaccagcgataaaatcatcacagctacgtagggaagtccttcggcaaagtagagcgaaggtacccagtaccagggagagcgtgtgcgcatagtcgttcgtttttagtataacttacggatttcagctccctggtagtaatgcagcagaatctggtcgtaggaatatcctttttcgcccatcacggcagcaccgatctgacagagtcccacaccgtgtccccatccggcaccggtcagttcgaaccattcgggcactccgttcacttccggtcccttgtcgaccacaaatgccgagctgaacaggtgggtaggtgagagggtgcgtcgtatttccagttcctttccgatggtcattgttttcagggttcctacaattttcagccggctgatacgtcccgattttccacgctctacggggataaggtcgagtatctccccgtagtcgctcttggtatgcgtggcaatgagttcggccagttcggcttgcgtgtatctcaccttccaacggtagaaatcgtgtgtctcctggtcgtagttgttgagtatctgtgaaaggattttcggatcggtggtgtggcagaaagactccggacgctggcgtatccatcgttcggcttcttcctcttgggtgaggtcggacaggggggcatccgtgtccaagtcgcgcacggcactgaggtaaggataatgcttgtcttcccagcagtagttgaactcttcggtcactccgccgcagcacttcgagaaacgggcgtcgcagatggcatgcttgtgcatgagtacctggccgcgtgtttcctttacggcttccaccacactctggttggaggcacgggtaatgccctggtagcgctggcaatggtcgtcggcgcatacgtcgaagatggtatggtcttcgcggtcgtaccagcggatgtattctgtttcggtcttgaggaaggggaagaagttgctgccctgtttgctgagggccttccgtttttcaatctgtgctaaaagccagcttcgggagatgacggcatgggctttcaggaactccagggaagaagtggcgttcatctcggacgagatgacgctggtcaggtagtcttctgccggcacctggttgatggcggtaatctttccttcgtcgaccaccagacgcagggtgccgaggaaggtttgtgtttcctggcgttcccagtggaaattgataccgatggttacgtcttcgagtgagaaggaggcatcgtcttccaacggggtaaaggtcagctcccggtacacgtttccgttccaggaaattcctccttcgtcgaaggatacacgttgcttgcccgatacggtttctcctttggccagaaacttggcattgagtgtaaaggctatttcaagggcattgacgatgcccacgttaatttcaggttctttcatgatgcttaatgtgttacttcgtggtagatttggcggagcgtgtcagcgtccagtttttgaagatcttcttcgcgggccgtcacaaggatgccggccatatcgagggcgccgggactgacaatcagctgtgcgtcgccttcggcagtgtagcactgcggacgatgggctgtgcgaggaatgtagacggtgacaaatccgtagcgcgggttgttccaggcaaagaggttgtagcgtggctcggtttctccttcgtgcaggggcaggctgtgcaggtagctgtcaatcagccgtacaccagtggccagtcctccctgggtaatgaaggcccgtatcggacagaagtatccttcgatgtcgtaggcgatgcaggatttgccgtcggagaggggttcgaaacctttttctaccgctgtgctcatcagtttctcccattggcggatgaggggtacatcttcctggcgtacggcctggaaatggaagtggtcgggggcagaagcaccgcatttggctccgttgtagaatacggtgtagccgctggcgaagttcttctccagccagtcgaccaggcgttcgggcaaccggcgcgaagttttgtcggccaatgtctgccactggtgactttccgtggagatggtgaggtgtcccggcagaatggggtatggattcagtcgcaggctgaaaggttcgtccagctggatgcggacagactcttgctcttccggcttgtggctcagacagaggaagcagggacgggcagcgatggaggccttgtctactttggcacaggtagaaacggcgcgtgccggattgaactgcacggtgatgtcgttcgcaccgagtgaaagtgtacgggtctgtacgtgtgccagtgcttcgtggtttttgcgggccagtggccatgtgtcgagctggtgacggataaaggtttcggcagaagccgcaggggctgcatcttcccatgaaagagggtgacggagcagggcctggcgtttccgtatttccagggtacgcaggctgtccttgtagctgttgttctggttctgcttctcaatactcagggctgcgtcggaattgccttcccagcgacggcacaaataaagtacatcgtagatacgtccgatgcggtattcccgggagaaagccagtcctaacgcataatcttcgccatagctggtgttcggtacacggattttccgcagcagcggcgtgaagaaagcacgcggggctcccagtccgttgatgcggagagcgttgttgtgtccgttggtatcggtccattccttgtggtcgatgacgcccggcggcaatgtctccagttggaagttggtcatgcggtaagagccgataaccatggcgcagcgttcccggcggaacttgtcgacaatggtctggagggtagacggactgctgtacaagtcgtcgctgtcgagctgtacggcaaagcgtccgcagagagggtgatgcacacccaggttccagcatccgccgatgcccaaatcgtcacgttcgggaatgaggtgaatcactttttcgtttccggcgtattggtcaatgcactccgtggtaccgtcggtagaatggttgtcgatgacaatcaggttgaacgggaagtctgtttcctgcttcagtaccgattcaatggcgtcggcaatggtacggatacggttgcgtacgggggtgatgaccgaagcttcgtatgcaaactcgccttccgacaaatcgattttgcgctccaccggaggcaggaaggcatgaatgttcttcaggtaataagtaaacgccgtttcccgttccagttgtacgctccggttgcgcgggtctacgtagtcaaactgtttttcgcccgacaggcgggtgtcttcttcgatttcggtgtaaaggaactcacgtatgtgcgtcagttcgtatttctgtgaaagtgccagtcgcacggcatacaaggcagaatactggtattcaggctggtgggtgatggtgtcgaacgcttcctgcagggccgccgtcttgaagagcagtaccgagccgaagtcaaaatcatcgcgcacgcttcccggctggtagtcgatgaccggatgaggctttcgtactccctctgtcacctgataatggtcggcatagaccatgcccgattccggtgcggctaagtagtcgcacatgcgttccagtgccatgtagcccatgtctaatgtgtggggcttggtataaataaggaggtagggggtgcgggtgaaggcaagcatctgtcggatgccttcggtatgctggaaggagaaagagggaagaaaatggcatttctccgtgggaatgtctttgtcctccggatggtcagttagtaggaatatctggtctgttcgggaactctccgttaggcctttgatggttttattctgctggttatcacttccgtataaaaggaagcaagttacttggttattcataatttaatacatttatacgtacaaagataggcaatatatcttattttttccctaactttgtacgctaaatatgtggaatatgcgcagtgctttcgtttaaggaaccgggaatgtctcagtacttcctcgaaagtactctagtacttccttggcagtactccagtacttcaggggaagtactccagtcctgacaagagaggactggaagtgagtaaaagcctgtggcataaagaagtaaagagcgctatgacgaaaaaaactcctttattaggcaaaacattgggcgagctgaaagctattgtgcaggatttgggaatgcctaaatttactgccgggcagattgcatcgtggctgtacgacaagaaagtaggctccattgaagagatgacaaacctttcgctcaaaaaccgtgagcggctgatggagaactacgaggtgggggccagtgcaccggtgcatgagatgcgttcggtagacggaacggtgaaatacttgttctgtacgcccgaaggtgattacatagaatccgtatatattcctgatgacgaccgggctactttgtgcgtgtcgtcgcaggtgggatgcaaaatgaactgcaaattctgtatgaccggaaagcagggatacacgaccagcctgacagctgcacagattctgaatcagatttattctgtgccggaacgggatacgctgactaacgtggtatttatgggcatgggcgaaccgttcgacaacctggacgaagtgttgcgtgccttggaaatcctgactgccgattatggctacaaatggagcccgaagcgtatcacggtttctaccgtaggactgcggaaaggactggagcgtttcctggaagaaagtgactgccatctggccatcagtctgcattctcctttcccttcccagcgcagggaactgatgccggcagagaaggctttctccattaccgagatggtggagatacttcgtcggtatgatttcagcaagcagcgtcgtctgtcttttgaatacattgtgttcaagggagtgaacgacagtctgatttatgccaaggaactggtaaggctgctccgtgggctggactgccggatgaacctgattcgcttccatgccatcccgaacgtggatctggaaggaacggatatggagtcgatgattgctttccgtgattatctgacacagcacggcttgttcgctaccattcgcgcttcacgcggagaagatatttttgcggcttgcggcatgctttctaccgcccagcagcaggcagagaaaaaagagaaagaaagtgaaaccttttaatacaagaaacataatgaaacgaatgacattttaccttgggatggccctggcggtgctgtcgcttgcttcctgccgcaacggagggaagagtatcattactccggtgtcaagcggacgcccgtatgaagtgatggtggtggccgatgacaaatgctggatgagtccggatagtgcactgtttcatgtgctggacacggatgtgccgggattgcctcaggctgaacgctctttccgtatttcgcgtgtgcggcctgacttttttgaccgttcggtgcgtctgttccgtaacatcattatcgtagatattcaggacatctatacgcagcccaaattcaagtatacgcgtgatgcctattcgtctccgcagatgattatgactattcaggcacctaaccagaaggagtttgcagactatgtttcgaaaaacggtcaggtgattattgacttctttacccgtgccgaaatgaaccgtcaggtgaagttgctggagaaaaaacacaatgaaacactttcggccaaggtacagagcatgtttgattgcgacatctggatgccggtggaaatggaatcgtacaagcaaggtgagaatttcctgtgggcttcgagcaacctgaatgacttgaactttgtgatgtatgcctatccgttccgcgaccacgatacgtttaccaaagagtatttcattcataaacgtgactccgtgatgaaagtcaacctgccaggtgcgcgtgaaggcatgtacatggaaacagccgattctatgtttgttgagacgcgcaacattgccgtgaagggagactatgcattcgaggcccgcggattgtgggaaatgaagaacgatgccatgggtggtccgttcgtatcgcatgtgcgggtagaccgtgacaatgcacgggttatcgtggtggaaggttttgtctataacccgggcaagctgaaacgtgaccagattcgaaagctgaacgcggcgttatatacactgaagcttccttcagaaaaagaagtgtcggagattccggtagacaattccatctcggaagaacaaatcaaacaagaagctgaacagaataagcaataaatatggaaaatcgtaaaattagagtgggaatcactcatggagatataaacggggtaggctatgaagtgatattgaagactttctctgaccccaccatgctggaactttgtacgccggtggtgtacggttctcccaaggttgctgcgtatcaccgcaaggccatggagatacagaccagtttcagcattgtaaattctgctgaagaggtgcaggacggaagagtgaacgtggtgaactgcatagaagaggagttgaaggtggaactgaccaagccgactcccgaagctggaaaagcggcactggctgcactggaaagagcgttggccgattaccgggaaggcctgttcgatgtgctggtgacagctcctatcaacaagcataccatccagtcggatgcgttccatttcccgggacatacggaatacattgaagagcgtgtaggtgaaggacagaaggccttgatgattctgctgaagggtgatttccgtgtggcactggtgactggccatgtacccgtgcgtgacattgccggtgaactgaccaaagaactgattatggaaaagatggagattttccatcgttcgctgaagaaagatttcggcatcgacaatccgcgtattgccgtgttctcactgaatcctcatgcgggagacaacggactgttgggaacggaagagcaggaagtgattattccggccatgaaggaaatgatagctcgtggcgtgcagtgcttcgggccgtatcctgccgatggtttcatgggctcaggcaattatacgcatttcgacggtattctggctatgtatcatgaccagggactggctccgttcaaggcactggccatggatgaaggtgtgaacttcactgccggtctgcctatcgtacgtacttcgcctgctcacggtacggcatacgatattgccggaaaaggcattgcttcggaagattctttccgtcaggcagtgtacgtggccatggatgtgttccgcaaccgtgcctgggaaaaagaaatcagtgcccgtccgttgcgcaagcagtattatgagaaacgagatgacagtgataaactgaaattagacagtatagaagaggaataacatgaagtttgcaatcatatcagcaggggaaggttcccggctggcacaagaaggagttcagttgcccaaaccactggtgcaactgaacggtatggccatgattgaccgtctgattcacatctttgcgaagaacggagcagaagaagtggtggtcattatcaacaatgaggtggctttgacaaaggaacacctgagcaagctggaaaaaacatcggaagtgcctttgcgggttattgtcaagacaacgcccagctccatgcacagtttttacgaactgagccgttacctgaaggacgaccgtttctgtctgactacggtcgacacgattttccgggaagaggagttttcacgctttattgatgctttcaaggcttttgaaggggatggcatgatggccgttacggattacatcgacgacgaaaaaccattgtatatcggtacggacgaagaccgcaatattaccggtttctatgatactttgcagcctgatacgcgttacatttcagggggaatctattgcctgtcgcccaactcaatcgtgacattggagaaatgtatggcgcagggtatgtcgcgcatgcgtaattttcagcgtcagctggtagccgacggccttcggctcaaggcttatcctttctcaaagattttggatgtggaccatgcgggggacattgtaaaagcagaggcttttttgaacggacaagattaaaaacagaataaaccaatattgattttttgcgtaaaatctagaaataagaataacaagatagaatgtgtaaaagaggagagaagattcgggtggttggtgtgagccgtggtaatgaatattccccgaatcacgtagacaatgatgcggcaatccttcggcttgcggcagaagcattggagagaatggggtgtgaggtgacaatttatccggaaaaggaatttgttgctcagaacatagagggtgaatttattttcgacatggctcgcgaccgcgccaccattgagcggttgaaaaaactggaagacgggggtgccctggtggtgaactctgcgtatggcattgacaactgtgtccgtcagcagatgacggagctgctggtggcaaatgaagtgccacatccccggagctttattatttctactgatgagaagtttactccttccgtgttcccttgctggattaagcgaggcaattcgcatgccatggtgaaagaagacgtggtgtacgtggaatgtcgggaagaagcagaagtggtgatggccgatttccggaaacggaacattccggtggcagtagtcaacgaacacctggtgggagatttggtgaagttctacggggtacagggaacgaatttcttttataccttctatccaacggaacagtcacacagcaagttcggactggaagccatcaacggagccacgagaggtttcccgttcgatgtcaagcagcttcaggcatacgccaacaaggcagccgaggtgctgaatgtgcctgtatacggaggcgactgtgtggtatcggctaccggtgaaatccgcatcatcgactttaacgactggcccagctttgcccgttgccgtgaagaagccggaccggaaatcgccaagtgtatctataatcgtattatccacaaattagaaaaataatgagtacggagaaaaaaggagtagaggcttctttcaagtccatggatacagaagagtttctggacatccatttcaatcgcccaataggttatgtgtgggcgttgtttttccagcgtttcggggtacatcccaatgtagtgaccatcctgtccatcattttaggcgtagcggcaggagtgatgttttattatcccgacatgacgcatacgctgattggtattttcctcttgatgtgggccaaccattatgatagttgcgacgggcagctggcacgtatgaccggcaagaaaacccgctggggacgtatgctcgacggatttgccggtgacctttggtttatcaccatctatgtcgccatctgtctgcgtctgatgaaccagccgcttcctttccatctgggagaggcttccggacagacctggagcatatatatatggctgatagcctggttctcaggtacggtgtgccatagcaagcaatgcacgctggccgattattaccgtaacatccacttgttcttcctgaagggaaaggcaggtagtgagctggataacttcaaacagcaacgtgagattttccatagtctgccgtggaaaggcaacttctggtggaaggccttcctgtatttttatggcaactatacccgcaagcaggaacagatgactcccaacttccagagtttctacgcttttgtgcaggaacgttacggtgacaacattcctcaggagctgcgcgatgagttccgtgccctgagcttgccgttgatgaagtacaccaacatcctgacattcaatacccgcgcgatagccctttacatcagcctgctgataggagaaccgtggttgtatttcattttcgagatggtggtgatgaccagcctgtttgtgtacatgcgtcgtcgtcatgaggccttgtgcgctttcctttaccataaatatgccaagtgatgaaggaaaagtttcggaatatattctggtttttcggcatcttcgccattgtggtcatgctctgcacgttcgatatggactatcaggagttgtggcagaacttgcgcaaggcaggggtgtggtttccggccgtgattcttctgtgggtgttcatctattacctgaatgcctggtcatggtatgtcattatccgcgacgggaaacatgccaaggtgcccttctggaaggtctataagctgaccgtatccggttttgccctgaactatgccactccggtgggactgatgggcggtgagccgtaccgaatcatggagcttacgccttacgtaggtgctagcaaggccacctcgtcggttattctctatgtgatgatgcacatcttttctcatttctggttctggctggtatcggtcgtcttgtttgtgatttttgaaccggtgaactgggggatggggatcatgctctcggtggtggctttcttctgcctgctggccatttatttctttatgaaaggctatcgcaacggaatggcggtacgcacgttcaagctgttgtgccgtctgccttatgtgaaacgctgggccagccgtttcctgactgaaaagagagagacgctggaacgcgtggacgcacagattgccgcacttcacaagcagcggaaaagcacgttctacgtggcattgggactggagttcatggcgcgtattgtgaattgtgccgaagtgttctttatcctgaacattctgaccgaccatgtgagcttcctgtcctgcatcctgattatggccttcacttccttgtttgccaacctgttctttttctcgcccatgcagcttggggcacgcgagggaggatttgcactggcggtaggagggctggccattccgagtgcgtttggcatctatacgggactgattacccgtgtgcgtgaattgatatggattgtaattggcgtgttgctgatgaaagtcggcaacggcaccccaaataagacaaaagatgagtaaactgacagatgtaaaaggcgtaatctttgattacggaggaactatcgatacgaacagccgccactgggcggaagtgttgtggagcaagtatgaagaatttcaggtgccggtggacaaggcgagtttccgtgaggcatacgtgcacggggaacgtacgctggcccgtgtgccgctggtcaagccggaacataatttccacgatgtgctgcgcatcaagaccgacattcagatgaagtacttggtggaacaaggcaagctggacggagaagaagcccgccgggaagactatgccgggaaagtggccgacagctgctaccgctatgtgctggacgtgctggaacacacccgtcccgtagtgaagtcactttccgaacgttacaagctggtgctggtatccaacttctacgggaatatccagaccatcctgaaagacttcggcttgtttgatttctttgccggcatcatagaatcgtcggtagtgggagtacgcaagcccgatcctgccatctatcggctgggtgtggaagccatggggctgcctgccggaaatgtgctggtggtaggcgattccttctccaaggacgtggtgcccgcaaaggctgtcggctgcaaggtggcctggctgaaaggtgaaggctggggcaacgaagaaatagatgaaacacttccggatgtaatcatcaccgacttgccggaacttttgtcgtatgtataaaggaggggcaaggatgaagaaaaaaggaattgccctggtggaacgccaatacctgttcccctttgtactgattacctcactctttttcctgtggggatttgcccatgccattctggacgtgctgaacaagcattttcaggaactgctcaccatcacccgtacccattcggccatgattcaggccacgatgtacatgggttatttcatcatggccattccggccggattgttcatcaaccgtcacggataccgtaagggtgtggtgcttggattgttgctctacggaataggctcgttgttgttcattcccggacaatatatagcttcgttcaatatgttcctgttctcgttattcgtcatcggatgcggactaaccttcctggaaacggccgccaatccgtatgtgacggagttgggagcacgggaaacggctgccagccgactgaatttcgctcagtcattcaacgggctgggatgtatctttgcaccgattctgaccggtctcttgcttttctccgacgaagacaaaggagcaagcggtaatgtggctcttccgtatgccgtgatgggagtgattgtcctgctggctgcgctggcttttatgcgcgtacgtctgccggaaattcctcatgaggaggaagtggatagtgaaggccatcgcgtaggtctgtgggcgcataagctttttgtgttcggactggttgcactgtttgcctacgaggtatccgagatttccatcaatagtttctttattaactacgtgacggaagttggctggatgaatgcccgcgatgcttcactggtactttcgttcggcggattgggactgttcatggtaggacgtttcgtgggaagctggattatgcgccgtgtccgtgccgagaagatgcttttctggtgtgctacgggaacagtcatcaccaccctgctggtgattctggatttaggctccgtatcgttcgtggcccttctttgcggctatgccttcgaggccatcatgttccccactatttttgccctttcgctgaaagggcttggcagtcatacgaagcgcgcctcttccttcctgatgatgtcgccggtgggcggtgccgtaggccccgtgcttatgggactggtaggagattgtgccgacatgcactgggcattcatcgtgccttttgccggctacgtggtggtgtggttctatgcccgtcatataatgattcagaaaaactgatgccgctttctttggcggtcatgtcattcatgataaagaagcgcgaaacccttcagtgtctcccgacaccgtgagggcttcgcgcttcgcttttagtgataattatagtaagttatttgtcttgaggagccagtggatgtgccggacatgcattcgggcagcatggggcgggcatgtgtcccggatggactgttccggcgtgtctcatcgggaaatgtcctttgtgaaatctgcccgggcgctccatgctgaataccttttccagctggcgggcattcagaatcttcttgaatgaagcatagtacttcttctgggtatcgagcactttctgacgaacttcaaagcgttgttcgatgtcctgctgaatctgtgcgtctgtacgttcgcacggttttactttattttcttttgcggccggacggcattctttcaaggcagtcaggtattccttgtagagagaagtaaactgggctaatttggcatcgtccagcatcagttgttttcccatacgctgagcctgtgcttccatacgttgttccggagtgagttttaccttgcaaggcttttcggctttttccggacaaacctgaggtgcagcattttgtgccatcacgcttccaaaacctaaacatacggtaagaatcaatgtagataataaatgagttgttttcattgtagtcaaaatttaaaagtgaataatcattttcagtgcacttacggctttaagacaatgaatccctcttgtggtttattgggaaaatgcttttttaacattttaggagatttaatttttgaagtgtgaaattctctgctgagaatgtgggaaatgtgtaaacttacttagataaatgagaatttagcaaacttcggatcagggtatgtaaaatgcttaggcgtttgaattaaaactctttgacgtttcagttaaaacgccaaagagttttgaaacgaatgcacttgcgtttcaagtcaaacgtccttgcgttttttagaggagtgcaatcaattcttttttattcttagaggatatggtaaatatcactgaatcagcatgctctcaacttctgacagatttccgtctgttttctcgggagtgatgtgaagcagacgggccagcaaggaataaatcgatacatttcggaacttcggagcttcgtatcttttcttgaaatccggtccgcatgcccggaacattacctgcatatcgtcgtaggtcgggtcaaatccatgggcacctggcagcgtcttgttgccttcctccactagccagcctaaatcaggcagtacgatgatgtcgcccacacgcggattgcttccatagttcaaataagcaggaatatcttcttttttccatacccgtacgtgattcagtccctgtagtgcctgatacacggagtcgcggtattccggtttcgtataaatctgtgccggcaggtttccgtcaatcaaagtataccatttttcgttcaacaggtgcttaataggcacaaaacggtctgcactgacagtcgccattccgtggtcggacgttacaatcaggttgatgtcccttccgaagggcaagctttgaagtccttcccataaatatttcatgagggcatccagctcttccacgcagcggcgtgtttccttgctgtgcgggctataagtgtgtccgtaggtatcagaatcctcgaaataaatcataaccagctggggacgttcttcttccggcagcttcagcattctcagtgcctctgccacacgctccgtctgggtgagccggggtttctggtcgtatacgtgatagtaggtggggtgctgtccttttacggcaatgtcagagcctacccagtagatgtttcccgttttgatgccctgcttctgtgcggtaatccagatgggttctccgccatagtaggacgcatcgttgcgggttttcaggttgctcattttgtaaagctcctggcgctgagggtcccagaatgtgttagccacaatgccgtggtggtcgggtaccaatcccgtagcaatggtgtaatggttggggaaggttttcgaagggaatgatggaatcatggtggcctttacaccttcgcgagccatccggtcgaagaacggtgtgtcgtacatttgcggataatcccagcggaacccgtcgagggatacaatgacggtgtagtgctttccggcccagatagagaggcagatgcaccacatcatacacagcgagataagttttttcataagtctggttattgttagagggtgataaaaaagaaaggtgtattgccgttctttcgtgggcaatacaccttttatgtaaagggttagtctttcattagaaagtcagtcttacacccacctggcaatgccagcgtgagctgatgtcgtttttagtgagcacgttgctttggtctttgaatgtgtattctggaactagaattccatcagcattagtgctacctgatacagtgaccggagtcaggttgtaaggcaaataatagttggcaccccacttcttgttcagcatgttggcaaagttgataacatcaaatgtcacttgaatcttgctaccgcgttctttcaggtagaagatgtcttgagctacgtgcagattgatttcatgctcccacttagtgaggtttgaattgcgctcggcaaactgtccacgatgattcttggcataatcatcgttcagaatccattggcggaaagcttcacggctttcttcttttgacataatcaagttgccttgtttgtcaaagttgtccacaaagttcatgtcctccaattctttatctgtcggaatatatagtaacgtggttcctcgtgatccgtcaccattgaaatcttttgcgtcatcatatgagagactataacgtccacccggagaagcattgtaagtgattcccactgtagtgctcatccatccgttcaggtacttaggagttgtataagatgcttgtaaggagatgcggtgaggaatatcgaagcgtgaatatcccaattctcctttagagttgctgtctttagagtagttgtactgccagttagaataggctactgaacttgttccgtcattgacagacttggaatgtccgaaggtataagaacctgataagtcaagaccaaagttgaagtgtttctctaacataaccgagaagttataagagtaaccttcattagtatttttcaggttgatgatgctattatagttacttgatacttgattataatagggtacggctgattgctcaagtccaggaatagcatatactttccctacttcctcaatagctaggttttcaaagaacacgttgtttagtgtttttgaataaataccttcaattgtaagttttacatcaccaggtaattgttgttctaatgcaaggttggtacgaaatacttgtgggtatttgaagtctttatctacgactgcgatgtcaacaatgggtttcccagatacggcttcgtatggattttttgcataatctttcattccaggaacagccacatatttctcattcaatgtagtgcctttctgctccataccgttgttggtgaatgagttgttcagccatacgaacggcacacgtccggtaaacagtcccaatcctccgcggagtagcgtacggtggttttcattcaggtaccaacggaatcctacacgtggggatacgagtactttggctcctggcatttcgcctacgcgagcttcccatccttgttgggtagcaaattcattgaaagaaacattggtggttggatcattgaagataactggaatatcaaaacgtataccataagtcagctcaaaattattggtcacgttccacttgtcttgagcataaaaaccaaactgccctgatttcatcgctggggcatagcttaagtttcctccggtcaaggttggatctgtgtatttatatctgaattcataggggttgtcattgagaaagtcttcaatgctattaaaataccatgctccgttattaccttgcataaaaaggttctgcatgcggtagatttcgttgtgtgtaccgaaggtaaatgtatggttgcctttgtaccaagaaaggttatcttcaaatgtatagatatcttggttcaagtagttggcacctgaagaatattcagtacccatatctatcttggtattattgttgtcgttagccgacttgatttgtacggttgcaccgttgtagtcaatgtcgcgattgtcgcgcacgaagctggcagacgcacgcaattcattgtagagagattctcccaaatgcgagttcaattcggctacgatagaattagtcttgttgttcatacggtaaccgctaccgttgaatcggaaggatgatgaactcaagctcaggttgtcatcgtaagagttgttatgctggtaacggatggcaagtttgtggttctggttgatgttccagtcaatacgtgccaataatccaaatgatttattttctatgtcacgcgggccatatgtttccttgatgccagtatattcttgatatttgctgataatccgatccgccatgtcctgggtcagataattatcaatataacccggatagatgttgtttggatatacatcagacttatgttctgcacttacgaaatagaaaagtttatttttgataagtgctcctccaatagtacctccgaatgtacgagtgtgctgttctccaagtttctgtttttcataatcacgtgcagcattatatttcccgtacatgttttcgttggtgaaataagaataagctgttgcttggaacttgttagtaccctgcttggtaatggcattgataccacctccggtaaatccgctctgacgtacgtcgaaaggagcaacgactacctgaatttcctggatggcatccatcgaaatcgggttggcacctgtctggccaccgttagttccagatgctgacaaaccgaacacgtcgttacttactgtaccgtcaatctggaagctgttgtaacggttgtttgaaccggcgaatgtgatacctccattcttcgatgtagaagccattggcatattttttacaatgtcatatacattgcggtctactgtcggcgtgctggtgatttttcctgtagagaagttgtgtgcagctccggcattcgcttttgcatcggctacgactactacttcgtccaacagttctgaacttggtttcatttcggcattcaggctgagtgtgttacccagttcaagtgaaatacctgtaaatgcagttttgttgtaacctacgtatgagatttcaattttgtagggaccaccggtacgcataccttggatggtgtaacgtccatctacgtttgttactgcaccgtagagagtacctgacggttcgtggatagctaccactgtagcaccgataaccggggctttggtttcatctaaaacttttccgctgatagcagaagttgttacctgagcatttgcgccaacagccatggctgaaacgactaatgcggaaaacaggaatttggaatgatgtaccataaaattttaattaaattgtaaatctattttcgagttttaattcgcttaatactttgtagttaagttcgttgaatctttttgtattacttgttttttctgttgcaaagttaaaaaatcttttcaacgaataattagagagtggacgatttaacaaattaggcagtcgataattaacttttttattttcctgtcggatagggaatatagaacgacagacttcttttttcttgattttgtgtgagttatataattcaggtaatatgtaataagtttgtaatttgagaactgatgaaagaagaatctgacaaggttattgtatgaatcctgaatttattttcattttgctttgtggttgactttattatggacatttgtttttttgtctatttttgcaaaatgaaagtaagagtttatcaatatgaaacaaaaattggaagagaataaaggaattccggcttcgttactgtggatactggccattatatcaggactttctgtggcgaatctgtattataatcaaccgttgctgaaccgtatcagtgaggatttgggtatctcggagtttacagctaacctgatacctatgaccacacagattgggtatgcgctgggattgttatttattatccctttgggggatttgtacaagcggaagaatatcattgtcattaattttctcttgttgtcggtggcgacttgcagtattgccatgtcggtgaatgtgttttacatcttgttggcctcgttggtgacagggatttgttcggtcatgccgcagatttttattccgattgctgcacagttttcgctgcctcagaataaagcacgtaatgtggggatgatggtcagcggtctgctgaccggtattttgggttcacgggtaatcagtggttttgtaggcgaatactggggatggcgtacgatgtattatattgcagccgtcatcatgttgctttgtatttttgtggtagttcgggtgttgccggatatgccgctaaatttcaggggtacgtacaaaggactgatgaaatcgctttttacgttgtacagggacaattcgaccatccgtctggtatctgcacgggccggactttgttttggtagtttcctggcgttatgggcatgtttggcctttaagttgagtggggaaccgttttatgcaggaaacaatatcatcggtatgctgggattgtgtggggtggccggtgcactgacggcctcttttgttgggagtctggtacataagtttggagtgcggtttttcacttttgttggttgttcgctcatcattgcagcctggataatcatgtttatattccagaattcttatttaggctttatcgtgggaattatcgtgatagatatcggtatgcaatgtgtgcagataggtaatcaaacctgtgcgttgtcgcaggctcccaaggcgaccaaccgcgtgaataccatctttatgacgacttattttgtgggtggttcactgggaacttttctagccggtactttctggcacgcttggggctggaccggagtggtctgtgtaggaatcggtctgacactgatttcactgcttgtgacgctttttactcgaaactgattattcaaatgaacgaatatatatgaaaaagaatgtgatttatttgaacgactggctggctattcatccgtatacgacagtttgttcttcagatacgttttttgtggaattggccaacaaactttatgcggcttgtcatttggaggaattgcctgagacgtttcgcaagtatttaagtttgtatgtggcagcttatctggaagacatcatttccggcctgggattgtggcagggatttaccactgctcattcccgtttgtatggcaggtgtcttccattctatcccacgggaaaagattatataaagggagaggtaaacctggaggacgtacgtttcattatctggaatacatggcaaaaggctccttactcgcgtgggtatgtaaatccgctggatacctcaatcttaaagcaggcacaggcttttctgcctttactggaggaagcttatgaggtggctccggagaatgagttgctgaaggattattttgccggctatgcagatgaaaaagaggctgaccggaaattgtcatggcttttcgggcacacttaccttacggagccttctatgttgccttacattgaacgggtggcaccggatgaccgttttattatccctacgggtcctttggcgttgttccttcacgaatggattgagttgttggctggtaagcaggcaaagtgctggaaatcggttcctcgtctgtatcaggaggaaaaggaaatgccggaaactgttttgcagaagaatgcggagatttatcgtctctttaccttgtggactggcggacggaagattatttatctcaacggttatgattcactgaagcgcttcctggtagagattctgcagtggccggatgatgagaatcataccttgccgcagatgaagagttgccggaactttgtattgatggtggatgagcagaaagggcttttgctggcgaaggatgtgtgtgaatacatcgccgacacggaaaatccttattatgatcaggaagaggcatcgcaaaatgcattccggatgttgacggaagagatgctttgtccgccggacttgttgcattattgcattgagaaaaacttgctgcccgatgcagaattgcctgaagtaggagagaagatgctggtgaaactgaatgcggactttattgcgcggcattcattactgtattattatcgcggcgattgattttgtcgagtatatatcataaaaaaagcacgaaccgaaattcgtgctttttttatgttaatggatatagaattagcaaaccttgtgtgaaccgtcgctgataactacatcgtatactttcgggctgcgaccgaatttttctttgaagcgttcttttgcagtagaaatgaatgtttcgtacaattcattcttaaccaggttgatggtacatccaccgaatccaccacccattacgcgtgaaccagtaactccacagtcaaaagcaatatcgttcaggaagtcgagctcttcgcagcttacttcatacagtttgctcataccatggtgagtttcatacattttctgtcctactgtttcgtagtcgcctctttccaatgcatcgcatacgtcgagtacacgctggatttcttcgattacatattcagcacgcatgtagtcttcttcagaaacttcagcttttacttcgttcagcatatccattgtgcagcctctcaggaattctacagtcgggtgattcttcttgatagcagctacaacagcttcgcagctctgacggcgtttgttgtatgcagaagatgccagttcatgttttactacagagtcaaccaataccaaacggtatccgtccggtctgaacgggaagtactggtattccagtgaacggcagtccagacgaatcaggtgaccttctttaccgaatacagaagcaaactggtccatgataccgcaattaactccgcagtagttgtgttctgtagcctgacctactttagccagttcgaatttatcaattttgttgtcgccgaacaaatcgttcaatgcgtatgcgtatgtagattccaatgcagcagaagaagacatacctgcacccagaggtacatcacctgcaaatgcagtattaaagccttttacgtcaactccgcgtttgatcatttcacggcaaacaccaaagatataacgtgcccagcttgctttcggagcatcttcttcattcaatccgaattctacatagtctttcaagtcgatagaataagcgcaaactttatcttttccgttcggtttgatttcagccaccatacctttgtctacagctcctgggaatacaaaacctccgttgtagtcagtgtgctcaccaatcaggttgattcgtcccggagaagtatatactgagcctgttgtaccgtcgaaatgcttgataaagcggcttcttacaaattctatgtccataatgataaaaattaaaggttaataaattctggtatataaacaagaaaggatgaagaatgagtccatccttcatccttgtgttttattattcagtcggaatgtctttgtttacattcttgcatccgatcaacgcatagaacaacaagtatgccaatgcggctgcaattacgataaagctgttcaggtaacctgctgagtcggctactccaccttgtaacagcggaagcaatccaccaccgcaaaccattaccatgaagattccagaagctgcttctgtgtatttacccagtccttctacagccaggttgaagataccaccccacatgattgaagtacagagtccgcagagtgccatacacattacgctgacaggaactgcttccaatccgaatgacagactagctccgcttttgaataccggcatgttgactacgctgctcaacggagttacgaaggcaataccgatcaaaaccaatccgagaatagaagctacggtcaacatggccttactgctgaactgagcaccgagtgaagcaccaatcagacgaccgataagcatcaggaaccagtaagtacctacgatagaacctgcaatagccggatcgatacccagaccgccttcatttacttgtgcagtcataaacaggtttgcaaagtgaggaacacctacttcaatacctacgtaaacgaagatggcgatggttcccagcttgaagtgacggaaagacaacgggctgtgttcgcctttgctcttgtttgccttagacaaacttggttcagggatagccatgaagaaaagtaccagaaacgcgatggcgaagatagccatggcaatgtaaagtgccggcaaagccttagcgatagtacgttcttctacgttggcacccatcaggtaacctaccaataccggaacgatagtagctgacaaagagttcagtgaaccgccagtctggataagctggttacctttcttgccgccaccacccagagtgttcaacatcgggttaactactgtgttcagcatacacatagagaaaccagagatgaaggctccagccaaatatacagagaatccgcctttagaggccaatgcctgaatacctacaccaatgaatcctactgcaatagcaatcaatgctgttttcttgtatccgattttctgtaaaagaagtcccgaaggaatacccataaaagcgtatgcaatgaagttcgcagcgaatccgagtgtagcttccaggttggtagctccaaattcactctgtacgataactccaaatggagccggcaatccggttacgaaagaaatcatagcaaacaatgcgaacatcattactatgggtaacaaatagcttttttgttgttgtgacatgttgtttaaaggtgttagtttgttataggttaattaaagaactagatttttatttttcaactccgaatttatagatagttacctgatggtaggtatcttccggcttcaacacgactgacgggaagtgtcctttgttgggtgagtcggggaagtgctgtgcttcaaagcagatggcacttcttgccgggaatgtagcaccgtggtatccagtgaaaccattgtgccagttggctgtgtatacttgtacacccggctctgtagtataaacttccagcgaacgtccgctttccggttctatacatttagccgcaaataccagagcttccgtttcgcgtttgttcagcacgtagcaatggtcgtatccggctccgttgatgagctgctggaacggttcattgatacggcttcccactgtgtgcggtgtacggaagtccatcggagtaccttctaccttcaatacttctcctgtagggatagatacttcgtctattggaatataaaaatctgcgttgattgtgacaatgttattgtctacggtcggagtcggattattcaaacctgccaggctgaaaaatgcgtggttggtcaggttggtgatggtctttttgtcgcagttggctacgtaagtgatgaccaattcgttctctcctgtcagtgtgtaagtaactgtgatgtccagattgcctgggaaaccttcttccccatctttagagagatagtgcagcgttacactatgttcatcttcctgtttggcatcccaaacgcgggcatggaaaccagtcggacctccatgcagggagttaggaccgttattgatggtcaaattatgttcttgtccgtccatcaggaaactgcctttcgcaatacggttgccatagcgtccgattaatgtactcaggaaaggttcgtgactgttgattacgttgtcgatactgtcatgtccctgcaccacattggccagtttaccgtttttgtccggtaccatcacagttaaaattgctcccccatagtttgtaattgctacttcggtaccttgctggttcgaaagaataaacaaatctgtctctttgccgtctacaattttttgaaaatctgctctttttaagccgcttaaattattttctttgtaaaatgtgttgttcatattattaaaatcttttagttcacacattattttgttgtgcaaataaaaagattttcttcaatatacccaaacattttcgaagaaagaacgttctttaattgtttaaagaaagtaaatcggcgacaataaaactgcttcctcccacaaaaataaaatcatccggctgggcctgttccttggctgcttcgaaggcttctttcacatgggggtaggcttctccgtgcaaattgaaggtttcggccagtgctttcatttgctggtaaggaagagctcttttcacgctggcttgtgtgaaataatatcgtgcatctttaggcaacatagacaataccccgctcacatccttatcgttcaccatgccgatgacaatatgtaaggttttataagtctgatgtctgagctgctcgttaatgtattgcatgcctcccgtattgtgtccggtatcgcagatgatggtcggtttttcacctaatttctgccagcgtcccatcagaccggtcagctcgcagacatggaggaagccttcacgtacattctcttctgacagattatatcctgcatgacgaagctggcggattgccgagagtagggtattggtattctttagctggcataagcctcccagttcgccctccagttgaggatagtcagctgtttggtaaacgtaatgcatcgcttcgttgcgggtcgcatggatgagcaggtgctcgtcttcggcaaatacaatgggagcccctacggcagtagccttagcctggaagacaggtcgggtttctggagtggtttcaccgattacgaccggagtaccttctttaatgatgcccgccttttctgaagcaattttttccagggtattgcctaaaaactgtacatgatcaaaactgatgttggtaatgacacacaagtcgggctgaatgatattggtgcagtccagtcttcctccaagaccgacctctatgacggctacatccacctgctgttcagcgaaataggtgaatgccatggcagtggtaagttcaaagaaagaagggtggagcggttcgaagaaagcacggtgcttttctacaaagtcgatgacaaattcctgacttaccggagtgccgtttacgcggatacgctcacggaaatccactaagtgaggagaagtataaagtccggttttatagcctgcagcctgtagaatggcagccaatgtatgcgaacaagaaccttttccgttggttcctgccacgtgaatcgtatggaatttgcggtgagggtgatggaagtaatcatccagggcatacgtgttgtctaatccttctttgtaagcatctttgcccacctgctgaaacagaggggcactattatataagtaggtaagtgtttcctgataattcatgatttctgctttttaaaaacagctgcaaatatcatcatttttatcaggataacctatctttttacgatttcatttaccagtaagtcccttgtgggtacttgattccttctactccgatgctgatggaactgctttcattaaacttgaaattaatcattcccccaatccggtcgggagcgaaatttggcatgggatagtaatagggtgaacgtttcggcatgagcgatttgttgccataggcatacagactgatacgttcgttgactttaaacgcagcaatgccggtaattcctacattacggtagttaatgccaccccagttgaaattgctggcatacaatccgcctgctacgctgaagcgcttgttcagcggtacggcgtacaagaaagcggcgtcctgaccgaaacccactccggaaggagcatatttgctcggactgaacgtgacattcatgccgatggaggcattgaatcctttatgcaactcccaggtggtatagccgtaattgaacggggtaatgccatacatatcgaagggagagtataggtaatgctgcggaacaggagcgggcaggggtacactgagtgtatccttagccatgagctgttcagcatgcaatgtcgtggaaagggagtcggaaggaagcgacttagggttttctgtctgtgctaaaacgagtaacggacagaacaatgtcagcagcaagatatattttttcatgactttcatttttttgttaccccaaaaatacaaaaaatgtcactgctatttaggctgttatctctttttagtcttggtttaaattttatttggataaagaagacgatgtggaccggagcagaatctgaaatgtcctgttctcttttcagtacttcttaaggagtactgtagtacttccacaaaagtactggagtacttcctatgcagtactgggaaaaaggctttcggccgaaataggagacttgcaggagtcgtgtttaaatgcagaaaggactgactccacttgtaggggagacagtcctttcttgtatctgaaaagctgttgcttaatcgaataaacttctgaatttcttgaagattttttctttcaggcttgtatttggcttgaagttctctgcttcctgccatttttccagtgcctgacgttcttctttcgtcaacgtttccggaatgtagacgctgatatttaccagcaagtcacctgtaccggtgttgtagccgtagctgttgatgtttggcagacctttgccgcgcaagcggagcactttgcctggctgtgtgcccggctcaatcttgatttttgcctttccatcgatggtcggaatttctaccgtacctcctaatgcagcggtcggtacgctcaacagaaggttgtagatcaagtcactttcgtcgcggatgagttccggatgcttttcttcctcaatcaagaccagcaagtcgcccggtaccccgttgtgctttccggcattaccttttccgttgatggtcacctgcatgccttcagctactccggccggaatcttcacggttactacttcttcaccgtaaaccactccttcaccgttacattccttacacttgttcttgataattttaccttcaccgccgcactgcggacatacagactgtgtctgcatcatgccgaaaatgctctgctgtgtgcgggttacgctacccgttccgtgacaggtaggacaagtttctgtacctccgtcaccttctgcccctgtaccatgacagtggctgcattctacgtatttcttcagcttgaatttcttttcaaccccagttgaaatctccttcaggttcagtttgacctttacgcgcaagtctgaaccacggaatttccgctgacgtgactggcctccgccaccaaatccgctgctgaatccgccaaatcctccgtgtccgccgaaaatatcgccgaacatagagaaaatatcgtccatagacatgccttggcctccaaatccgccaaatccacttccacctccggctgcaccgtctactccggcaaaaccgaactggtcatagcgtgaacgcttgtccgggttgctcaatacttcgtaggcctctgcggcttccttgaacttctcttccgcttccttatcacccgggttgcggtccggatgatattggatggccttttttcggtaggccttctttatttcgtctgccgtggctgttttggcaacccccagcacttcataataatctcttttcgccatgactatacctgtttattattgggcaaccaccacttttgcatggcggatgactttttcgttcagtttatatccggtttgtacacaatccaagaccttgcctttctgttcttcgcttggagcaggtaccaaagccacagcttcatggaagtcagtatcgaatgcttcgcccacaggttccatcttttccaagccttcctggtgcaggtttttcaaaaacttctgataaatcagttccactccctcataaatggctttcacgtcttctgccttctgcatgttctgcagcgcacgttccaaatcgtccagaatcggcaggatagcattgatagccttttctcctccgtttttgattaattcggctttttcctttaaggtacgtttgcggaagttgtcgaattcagcagacagacgcaggtatttgtctttctgctcgtcgatgactttctgagcttcttccagttcttttcccaacttttcttcggcagtcagttccttttcttctgaagaggcattttcctgtgcttctgatgcttcggaagtcgtttgttcattctcggcagtttcttgtgactgctttttcaattcttcttccacgttcggatttttattttcgttgttcatatcttaatggtttttattttcgtttgaatagttttcttttctctctaacaaatttcgtgccttaatggcagttttattcaaattggctgcaaaaataataaaaaactgccacactgacatagaaaaaacgaagattacacgtgtactcccgattttggcatttcatcattctgataggtcagttcaacccttgatttgtcagcttcgcacgtttgttgggcttttattgtgtggtgtgaggtaattttgtttccatcatcaatcaatacacaagaaaatgtttaagaaaatagtccgtttttcaattcgaaaaaaactgtttgtcgtgttgacaaccttgtttttaatgattgggggcatttattcaatgctgacattgcccatcgatgcagtgcccgacattaccaataatcaggtacagattgttaccgtgtcgcccactttggcccctcaggaggtggaacagttgattacttttccgatagaagtggccatgagcaacatcatgaatgtggaggaaattcgttccgtgtcccgtttcggcttgtcgctggtgaccgtggtgttcaaggaaagtgtgcccacactggatgcccgtcagctggtgaatgagcagatacaaaccgtggccggagaaattccttcggagttgggtgtgccggagatgatgcccattaccaccggtttgggtgaaatctaccagtatgtactgaaagtagctcccgggtatgaggataaatatgatgccatggagttgcgtaccattcaagactggattgtgaaaagacagctttcgggcattccaggcattgtggaaatcaacagtttcggaggatacctgaagcaatatgaggtggctgtcgacccggatgctttgtattcgctcaatatcaccatcagcgatgtgtacgatgcattgagccgcaacaaccagaatactggaggtagttatatagaaaaggtgaaccgtgcctattacatccgttcggagggtatgattaccgacttgaaagatattgaacagattgtcgtgaccaatcgtggaggaatccctgtacatgtgagcgacattgctaaagtacgctatggagctcccaagcgttttggtgccatgaccaaggatggagaaggtgaatgcgtaggaggtattgccatgatgttgaagggtgccaatgccaatgtggtcacgcaggagttggagaaacgcgtggcgaaggtacagaagatgcttcccgaaggagtcagtgtagaaccttatctgaatcgttcggaactggtgaaccgtaacatttcgacagttatccgcaacctggtagaaggagccattattgtgttcttggtattgattctgttcctcggcaatgtccgtgcaggattgattgtggcttccgtaatcccgttagctatgctttttgcctttatcctgatgcgggtgttcggtgtatctgccaacctgatgagtttgggagctatcgacttcggtattgtggtagacggttccattgtgatattggaaggaattctggcacatatctatggccgtcggttgatgggacgtactcttagcaaagaagaaatggatgcagaggtggagaaaggagccggcaatgtcgtacgaagcgccacgtttgccgttttgattattctgattgtgttcttccctatattgactttgaccggaatcgaaggaaaatactttactccgatggccaagacgctggtgttctgtattatcggtgccttgctgctgtcgctgacttatgtgccgatgatggcttccttgttcctgaagcgtacggtatcggtaaaaccgacattggccgaccgtttctttgaaaaattgaaccgtgtatatcgtcggacattggacttctgtctgtcgcatgtatggggtacgctggtgtcagcctttaccttattaatactttcgttctttctgtttacccgcttgggtgccgagtttattccaactcttgacgaaggtgactttgccatgcagatgacgcttccggcaggtagttcattgagccgcagcatcgaggtgtcgcttgaggctgaaaagaaactgaagcaggatttcccggaaatcaagcatgtggttgccaagattggtaccgcagaggtcccaaccgacccgatggcggtggaagatgccgacgtgatgattgtgatgaagcctttcagcgaatggacatcggccagcagtcgggctgagatggtagagaagatgaagaagtcattggaaacggtggaaggggcagaattcaacttcagccagcctatccagttgcgtttcaatgagttgatgacaggtgccaaagccgacattgccatcaagctgtatggagaggatatgactgaactgtatgccaaggccaaagaagctgcgaaatacgtggaacaggtgcctggggctgccgatgtattggtggagcaggccatgggacttccgcaattgttggtgaagtatgaccgctctaaaatagcccgttatggcattgacatagaagaattgaattccattattcgtacggcatacgctggagaaaccgccggggtagtctttgaaaacgaacgtcgtttcgacctggtacttcgtctggataacgaaaaggtgaaggacttgaatatcgacaaactgtttgtccgcacgggcgaaggtattcagataccggtcagcgaggtagccagcattgatttggaaaacggtcctttgcagattaaccgcgatgcgaccaaacgacggattgtcattggggtcaatgtgcgcgatgccgatattcagcaggtagtagagcagatacgtacctctctggagaaaaatatcaagttgaaaccgggatactactgggaatacggcggacagtttgagaacttgcagaatgccgtgcgtaccctgagcattgtcattccgattgcgctgatgctgattctgctgttgctgttctttgccttccgcagtgttatctattcattggttgtcttttctacggtgcccttgtcactgattggcggtgtggtagctctgtggctgcgcggacttccgttcagtatttcagccggcgtaggattcattgccctgtttggtgtagccgtgttgaacggtattctgatgattaaccattttaatgatttgcgaaaagaaaaaacatataccatgtgtacgaaccgaattattgcaaaaggatgtcctcatctgttgaggcctgtcttcctgaccggattagtcgcttcattgggctttgtgccgatggccgtagctacttctgccggtgccgaggtacagcgtccgctggccacggtagtgattggtggtctgatagtatctactgttttgaccctgattgtcattccggtattctatcgtctggtaaatgtgatagcccatctgtggggccggaaaagacatcgcgcacggttgggacgcaaagcgggtatgacgtgtatgttgctcctcgcagccgtatctgtttctgcagtcactccgcagaaagcaattaccctggatgaggcggtagaaatagccttgcagaaccatccccgtctgaagatggccagtgcggagattgaacgcagccgcgcagcccgtggtgaagtgtgggatggaggaaataccttgttcagctattcttggggacagttgaacggcgaatacaagaaagataatgaactggccgtagaacagtcgttaggctctttgctgactcctttttataagaatgcgctggtgaatgcccaggtaaccactggcactcattaccgtgacatggtgaagaaagagattgtggccgaagtgaaacgggcctgggtatattatcagtatgctttccacctgtatcatttgtatggagcgcaagaagaactggccttgaaattgcgtgagagcggcgacttgcgttaccagcaaggagatattgaccagacggagcgtaatatgattgcgacactggccgccgaacttcacactcgcagcttgcaggcgcgggaggagatggaacttgcttcccgccgtttcgcctgggcatgttatgccggtgaacaggtggttcccaacgacagttcattggctgtgcttccgctgtccttgcaagaccggatgctttcggctcctcatctgaactattttgccagtcaggtgcaggaaaagaaatcgcagcttcggatagaacggagcaagttcttcccggaattttcgctgggttatgtccgtcagaaaattgctccgctgaatggcttgaattcgtggatagtgggagtgtcttttcccattctgttcttcccgcagcgtagccgcagcaagcaggcaaaggtgagtctgcagattgctcaatgggaagccgaccagaaccgtgtacaactgaataacaaggtggaggaactttaccgtcgtgtgcgccagcagcaggaaagcttagattattatgccaaagctgcgttgaaagaggcagacgccttgcaggaaagtgccttgatgaagttcaaggaaagtgaaatcaacattacggagtttgtgcagagtctgaacgcttcccgtgacattcgccggaattatattgagacggtatatgcatacaatgtgtccgtgttggaaatcgaattatatacagaataaaaataaaaaaacatagcaagatgaaacaaataccttttttctcagccttatgctgctcgctggtgatggcctcttgtggaggtggtgccactgaaaaaacatccgatgaatctacagcggtacagtccgtacagcaggatagccttcaggcatcttccgacagcctgaaagtggatggtactacgggagctacccaggtggccaatgcaccttcttttaacggtatcttgatgataccgccacagcaacacgcaacgattactcttagtatgggcggggctgtacacagcgtatctttccttccgggcgattatgtgcgtaaaaaccaggtcattctgacgctggagaatccggaattcatagccttgcagcaaacctggctcgatgcagctgcgcagactgagttcctggaaaaagaatatcttcgccagcagaatctggcttctcatgaggctgcttcacaaaaacggatgcagcagagcaaggcggaatatttgtcgatgaagagccgtctggatgcagctgcagcccagttgctgattttgggagtggatgcccgcagcttgcagacaaaaggcattcagccttatttggagataaaagcgccgttaaacggctatgtcacgaacatgaacgtgaacgtaggaaaatatttcaatgtaggtgagcccgtgtgcgatgtgattgacaagcaggccccgatgctgcagcttacagcctacgaaaaagatctggataagttgaatgtgggcgaccgtatggagttccatgtaaacggaatgggaaatgaaaccttcgaagccgtactggtttccattgaccagatggtagacaatgccaaccgttccatcaaagtgtatgcccgtgtggctcatccgcagaaagattttcgtcccggcatgtatgtgtcagcacgtaagtcgacaaaaaatgaataactttgcagcatgaagcgaatctggagcaataaatatgtgctgatagtgaatgccatctccatcatggtggcattccttacgcatttcccggaattgattaccttgtcgaatccgtattcggccgacgggctttcgtttccgggcatgcactgggctgatgtgggcaatgaggtattatttacgtacctttcccttctttttctctttttcctgaatgaagccgtgttccgtttcaatagcgatatggtttctatcgggtggaaaaaggtggtttgttcgtttgtgctgacctgggtagtaagtaacctgctgggcaaatgctttgtttacttgcatcagcatttcgatgtgcctgccattgatgccatgcttcatcattatcttcatcctctgcgtgacttcctgataacctgcattgtgacgggaagctgctatttcttccatcagaaccggaagagccgtaagatgctgtttgcaaaccagcagttgcgcatggagaatgtcatcaatcagtacgaggccttgaaaagccagttgaacccccacatgctgtttaattcgctgaacaccttgtaccttttgattcgggagtcacccgacaaggctcgccactatctggaagaactgtcgcgggtgatgcgctacaccttgcaggacaacgagtcgcattccgtgactttgcgcgaggaaatggagttcgtacagtcgtacatgtaccttttgcaggtgcgttatgaagagaatcttcagtttgacatccgtatccatccggaactgatgtcacggaaactgtcacccatggccctgcagttattggtggagaatgccgtgaagcacaatgaaatcagtaaccgccgtccgctgacagtgtctgtgatagccgaaggtgacacggtggaagtgagtaatccgcttcagcccaaacggggagggagtgccggaatgggcatcggactggcaaatctggccaagcgctatcagttgctgtataaaaaagacataatcgtaaaagaggaaaatcatcgtttcgccgttattctgcctttgatatgaagactttgattatagaagatgagaaagcagccttgcgcaacctgaaggccgtaatgcaggaagtgaacaccgattttgaaatcgtcggcgaagtggacagtattttcgatggggtggagtggtttcgcacgcatcccatgccggagctggtgtttatggacattcatctggccgatggttcagccttcgatatctgtgcgcaggtagacatcacgtgccccatcatctttactacagcctacgatgaatatgccttgcgggcctttaaggtgaacagtgtggcctatctgctcaagcccatcagccggactgatttgcaggaggccatgcacaaactggaattgctggacggacaggtgaaggaagaaaaacagcctgacttgtcggctatcatccgtagtttgaaaaaggaagaaaattacaagacgcattttctgatgccggtgaagggggataaacttctacctgtgtcggtggaggctatccagtatttttatatctccaacgggctggttaaggcggtagatagtgagggaaaagaatttgtcttctctcagtcgctcgacgaactggccgagcaattgaatccgcatgatttcttccgtgccaaccgccagtttatcgtgtcgcggaaggccgtatccgacatcagcctatggttcaacggacggctggccatcaacctgaaagtgccggtgcccgagaaaatcatcatcagcaaggccaaggcttcggaattgaaagactggttctgattttgtaagacgtgcggtacttgtcaatctgaaatgaaacctcctcttctcctttatactgtatctcatatttttatattatctttgtgccgtaattcaaaaaaggtagaaaaaacagatgataacagtttcaaatgtagccgttcaatttggtaaaagagtgttgtataacgacgtgaacctgaagttcacgaatggtaatatctatggtattatcggagccaacggtgccggtaagtctacgttcctgaaagtgatttcaggcgagctggaccctactaagggtagcattaccctgggaccgggcgaacgtctttcggtgttgagccaggaccactttaagtttgatgcccacacggtgctcgataccgtactgatgggacacaccatcctttgggacatcatgaagcagcgcgaggctctgtatgccaaggaagattttaccgatgaagacggtatcaaggcagccgaactggaagaaaagtttgccgaactggaaggctggaatgccgagagcgatgcagctatcctgctgagcggactgggcataaaagaagacaagcactacacgctgatgggtgatttgagtggtaaggaaaaggtgcgcgtgatgctggcacaggcgcttttcggaaatccggacaacctgttgctcgacgagccgaccaatgacctggatatggatacggtgacctggctcgaagaatacctttcgaactttgaacataccgtgctggtggtaagccacgaccgtcacttccttgactcggtatgtacgcatacggtggacatcgacttcggcaaggtgaacctctttgccggtaactatagcttctggtatgaatccagccagctggctctccgtcagcagcagaaccagaaggccaaggcagaagaaaaacgtaaggaactggaagaatttatccgtcgtttctctgccaatgtagcgaaatccaagcagactaccagccgtaagaagatgctggagaaactgaatgtggatgaaatcaaaccgtcttctcgtaaatatccgggtatcatctttacgatggaccgtgaaccgggtaaccagattctggaggtttccggactgcgtgccgaaacggaagaaggaacagtgcttttcaatgatgtgaactttaacgtggagaagggcgacaagattgtcttcctgagccgcgacccgcgtgccatgacggccttgtttgagattatcaacggacaccgtaaggcacaggccggacactataactggggagtaaccattactacggcttacttgccgctggataatacggattatttcaactgcgacctgaacctggtagactggttgagccagtacggtcagggcaatgaagtggagatgaaaggcttcctcggccgtatgttgttctctggtgaagaggtgatgaagaaagtcagcgtgttgtcgggaggtgagaagatgcgttgtatgattgcccgcatgcagttgcgtaatgccaactgtctgattctggatactccgaccaaccacctggatttggaatctattcaggcgttcaacaacaacctgaagatttacaagggaaatgtactctttgcctcacacgaccatgagttcattgaaaccgtggccaaccgtatcatcgagttgactccgaacggaatcatcgacaagatgatgagctacgacgagtatatttcatccgaccatatcaaggaaatgcgtgcccgtatgtacggcgataaataagactcaaaaaacgcctttgcgtttggaagaaaacgcaagtacgttttatccgaaacgcaaggacgttttgatcaaaacgcttaggtgttttacttaaagcgcaagtacgtttttgtggaaacgcacttgcgtttttttctgttcgtcaggactcctttggaatattttgaaaatataggtataatcttcaaattatcagttagttattatggactcaactttaaatcctactcaaaaaacacacatcgtgtggctcgacgtggttcgtctggtagccatgttcactgtagtatgctgccattcggcagacccgtttaacttctatccgggagaacctccggccaatattgcggaaatcaagtggtggggtgccgtgtatggttccttgcttcgtccgtgtgtgcctttgtttgtaatgattacaggagccttgctgttgccggtaaaaggggaggtggctccgttttatcgtaaacgcatcgggcgtgtgttctggcctttccttatctggtcggtcatttacaatcttttcccgtggattacaggcttattgggagtagctccggaagtcattctcgattttttcccgtattcgggtgaggaggtgatgcgccagtcactcgatgtatcgttgggatacattgcacagatgccgttcaacttctctttgctagacgtgcacatgtggtacatttatctgcttatcgggctgtatctgtacatgccggtattttctgcctgggtggaaaaagccagccggaaagcacaacggtggttccttgtggcttggggtgtgacgcttttcgttccttattacagggaatttgtagggccttacatttggggttcctgttcctggaacgagttttatatgctctatatgtttgccggattcaacggttatctgctgttagggcattatctccgtcacacggaatggagcctggcaaaaacactgggatggggaatccctatgtttgtcgtaggtttctgtgtcacgttcttcggtttccgtcacatgaccgcatcgcccgactgcacggaagaacagcttgaacttttcttctactattgttccctgaacgtggtgctgatgacccttccgttgttcatgctttgtaagaaagttcgtgtaaatagtcagccaatacagaaagcccttgccaatctgacggtatgcggtttcggagtgtatatgattcattatttcttcaccggtccgagcgtagtgctggcccgtatgtgtcacgtgcctgtcggattgcagataccgtttgctgcggtagttgctttccttgtatcatggggactggtgattctgcttcgccggctgaccggaaagtatgcccgttatgtggtagggtgagggagtttatttcaaaaactccccgccgaaagataagggtaacaagtctttggttccgtctatctcgtaaatcgcattttctccatatagcaaaatgcgcataggctgttggtagcgctgttcagtttccaatagcacctgccggcaggctccgcaaggaggaatcggtgtatcgagatagccggattcacttcgggcggcgatggccagtgtctgcacaggctggtcgggatactgggaattggcataaaacagtgtggtacgttcggcacatgttccggatgggtaggcagcgttttcttgattcgtgcccgtcacaatcaccccgttcttcagcagggcagcggcaccgactgagaatttggagtaaggcgcatagctgcgtgaggtggcttctttagctttgtctatcagttcacggtcttgtggggtaagttcatcgtattgcaaggagtggatacgaatttcaagtttgatttctttcatggcttttgtttttgtagttggtaaacaaatataagtaaaaaaatgcttttctccctgtttttctgtatttttaagtgtttgcccgtaagcttctgtggtgaatcgtttatctttgcacgttaaacggtaaagaagaactgcatgaaatcattaaaatatattttggtgtgctgtctggcagggatggcactctctttgggagcagctcagcgcaagaataaggcatacgaagattacatccggcagtatcataaaattgcagtggaggagatgaagcgttatcatattccggccagtatcacactggcacagggactgctggagtcaggagccggacgaagtgaactggcccgcaagtcgaacaaccatttcggtatcaagtgtggacggagttgggacggacggacagtacgtgccgacgacgatgcaccgaatgaatgtttccgggcttatcgtcatgccaaggattcgtatcgtgatcattccaaattcttgcgtacgggagcacgttatgcctttttgtttcgtttgaagattacggattacaagggatgggcacgtggcttgaagaaggcaggttatgccactgacccgcgttatgctgatcgtctgatcaacatcattgagctctacgacctggatcgttacgataccaagaaaggtttggaatggatagaagaattccccaatccgcatcagccgtatttagctaatgatatggtgtacatcatcgcccgtaggggagatacgtttgaaaaactgtcggatgaattgggtatcagcaagaagaaactgcgtacttacaacgagcttcccaaggactatcagtttatgggaggggaaattgtgtacctggagaaaaaacaccgtcgggctacgaaggaatacattgtgtacgtggtgcgtcagggtgattccatgtactctatttcccagaaattcggtatccgtttgaagaacctgtataagttgaataagatggagccagattcaccggctccgaaagtaggcgatattctgcggttgagataaccggtttattcgtggtggtaagggccgttgtttagaatggtcatggcccggtaaagctgttccacgaagataagccgtatcatttggtgcgaaaatgtcattttggaaagtgaaatcttttcctgggcagcctgatagacggaaggagagaatccgtaaggtccgccgatgatgaacaccagccgcttgtttacggtatgcattttccgctctatccagttggcaaactcgatggagcggaattcttttccatgctcgtcgagcaatactactacatcgccgggctgcaaggctttcaggatggcttcgccttccttttctttttgctgctccatgctgaggcttttggtattcttcagttcaggtatcacctccatatcgaacgaaacatagtgtttggtacgttccacatagtcattgatggctgtgatataatgcttttcgaccgttcggccgaccacaagtagggtaaatttcatatcttttttactttgattaaaacgggttgcctttgcaaagatatgaataataattacctttgcttcctgaaatatcacttaatattttgaacaaaatggacgaaaaaattgtaaaggatttgattgaccgtctgattgacctctcttttgcagaggatataggtgacggtgaccatactacgttgtcttgcattccggcggatgcaatgggcaagtcgaaactgctgattaaggaagaaggtattctggccggtattgaaattgcaaaagaagtgttccatcgctttgaccctgaaatgaaggtagaagtgttcattcaggacggtacacacgtgaaaccgggcgatgtggccatggtggtagaaggaaagattcagtctttgcttcagaccgaacgcctgatgctgaacatcatgcagcgtatgagcggtattgctacgatgaccagcaaatatgtagaacgcctgaaaggtacgaagactcgcgtgctggatacacgtaagacgactccgggtatgcgtattctggaaaagatggcggtgaaaatcggtggaggagtaaaccatcgtatcggtctgttcgatatgattctgctgaaagacaatcacgtggactttgccggaggaattgacaaggcaatcacgcgtgctaaggaatattgcaaggcaaaaggaaaggacctgaagattgaaattgaagtgcgcaacttcgacgaattgaagcaggtgctcgacctgggtggagtagaccgcatcatgctggacaactttactccggaaaatacacgcaaggccgtagaaatggttggcggtcgtgtggaactggagtcatcaggcggtattaccttcgacaccttgcgtgactatgcagaatgtggagtggattacatttctgtaggtgcactgacgcattctgtgaaaggtcttgacatgagtttcaaggcttgctgaggctgaccgaatgaaaggcatgccccacttgttaaataagtatctaccaaaataaaataagaagagtgatgaaaaaaagtgttttatggagaagtgtgctggtgctggcattgtgtattgccggaacagccaatggaatggctcaggacctgaaatcaattctgtcaggtgtagccaatgcggtagcgaataaggtaacgggtgaaagtgcctcattgacaggaacgtgggcttatgtgggtccggactgtaagtttgagagtgacaatctgctggccaaggctggtggtgaagtggctgccaaacaggtagaagataagatgagcgctgtactggagaagctgggtttcaaggaaggtacaacctacaccttcaatgccgatagtacgtatacttcggtggtgggtggaaaaacagttaacggaacatacagttacaatgcggataccaaggaactgacaatgaaaactcgtctgggattgaaagtgaatgcgacggtttcgaaggggctgaccggagataccatgagcctgctgttcaaggcagacaaattgatgtcgctggcacagaccatcacaggagctgtggcaagtaagtcatccaattcggcagtaagtacagccagttcgttgttgagccaatatgacggattacaattgggagtgcagctgaagaagcagtagcacattgtagattgtaaagaataaaaaagaagcatggattttagcgaatgcctggaatccatgcttctttttttatgtcagatgcatcccttgctggaaggaatctcaaaatgatgaatgtcacggcgtatggccatcttgatgctgcgggcgagggccttgaagataccttctatcttgtggtgctcattggttccctcggccttgatatggaggttcatacgggccgaatcactcagcgacttgaagaaatggaggaacatctcggtaggcatgtcgccaatcttttcacgggtaaaggtggcgtcccataccagccaggcccgtccgccgaaatcgagtgaaaccatacactggcagtcgtccatgggcagacagtagccgtagcgttcgatacctctcttgtttcctaatgttttgtatagacattctcctaaggcgatggccgtatcttcaatggtgtggtgctcgtccacttccaggtcaccgtctacgtggatgtccaggtcgatgccgccatgcttgcctatttgttccagcatgtggtcgaagaatcccagtccggtatggatatggcaggtgccgtttccgtccaggttcacccggatacggatatcggtttccttagtcttgcggcatacctcggcagtacgttcaccggcaaagagaaactctgccacgcggtcccagtcggtggtagctaatacgcacgtgtcttccagtcctttttcggtcagcagacttttatccggttgcagcaggatggccttgcagcctaagttcttggccagctctacatcggtagcgcggtcgccaatcacaaagcttccgcccaagtcgtattccggattgttcaggtaggccgtgagcatgccggtgcgtggcttgcgggtaggggcattgtcttccgggaaactccggtcgataaggatgtcgtcaaattcaatgccttcgtttttgaacgactgaagcatcaggttgtgcacgggccagaatgtgtcttccggaaaagaatcagtacctaatccgtcctgattggtcaccatgacaaactcaaaatccagtttctgccgcataaagtagaggttgcggaacaccttcggatagaattccagtttctcgaacgcatctaactggtaatctacgggcggctcgatgacgagggtaccgtcgcggtcaatgaacaatacttttttcatgcttcctcctccttgtagtttttcagggcttccagcagggtatcgttctccggacgcgtaccgatggtgatgcgcagacagtcctgacaaagtgtgacactactacggttgcggacgatgatacccttatccaccaggtagttgtagattttcttggcatcacttactcgtgtcaggaagaaattggcatcagtaggatagatacgtcggcagcaagcaagcttctggaattcctgcatgagacgggtacgttcgtggagcaaggattctacccactgctgtacctgataatgcttttcaatcatgtggatggcttcctgctgggtcagtcggtttacgttgtacggatatttgattttattcagcaggttgatgatttcctgagaagcaaaagccatgcccagacggataccggcgcatccccatgccttggagaaggtctgcaggataatcaggttcggaaattcgtcgagctgctgcaggaacgatgcttcatttgagaagtctgcgtatgcctcatccagaataaccagtccttcaaatgagcggagcagggtaagaatctcttcccggcacagacggtttcccgtcgggttattgggcgaacagaggaaaatcagtttagtgtgttcgtcggcagcagccagtaagtcggcagctttgaactgaaagttttcatccaactgtactttccggtattccacgtcatttacttcggcacatacctgatacataccgtacgtcgggtcgatagccactacattgtcaatgcccggacggcagaaagcacggaaaggaaggtcaatggcctcatcgcttccattacctaaaaaaatgcggtctggcgataccttctttactcttccaatcaggccctttaattctctttgaagcgggtctggataacggttgttgggggtattgtagggattttcattggcatccaaaaatatggaagcctctttcccgctatattcgtcgcgtgccgaagaatagggtttcaaggcccaaatgttcggtcgcgtaagttctttcaatggtttcatagttacttatttaaacgtacggatactgcatttttgtgcgcgtcgagttgttcgttggctgccatgacttcaatggccggaccaatcatggcaataccttcgggtgtaatttcctggaaggtaatcttgcggatgaagctgtccagactgactccgctgtaggccttggcataaccgttggtagggagagtatggttggtgcccgaagcatagtcgcctgcactttccggagaataatagcctaagaacacggaacccgcattgacaatgcgttcgctgatttccatgtaatccttggtttcgataatcaggtgctcgggagcatattcgttggtcatttctacggcttcgtccatgttcttcactaaaatcaatttgctggcagctaaagaacggctggcgatttcctttcggggaagctgggccagctggcgttccacttcttctgtcaccgctttcagcaaagtttcactggtggtaatcaggatggcctggctgtcggtgccgtgttctgcctgtgaaagtaaatcggcagccacaaagaccggattggctgtttcatcggccagtaccgctacttcagaaggcccggctggcatgtcaatagctacgtcacgtaaggaaacctgctgtttggcggcagtgacatactggttgcccggaccgaatatcttgtatactttgggaatgctttccgtgccataggccatggctccgatagcttgtaccccgccggctttgaagacgcggttgatgccagccagtttggctgcgtagagaatggccgggtgaatctttccttccttgttgggaggagtacagagaatgatttccttgcatccggcaatctgtgccggggtagccagcatcaggacagtggagaaaagaggagctgttccaccgggaatgtacaatcccactttctcgatagctaccgctttctgccagcaagtcacgcccggcagtgtggtgattttctttccctggaatacctgtgcggcgtggaacgtgcggatgttgttataagccagtgtgatggccgccttcagttcgatgctgactttcttttctgcttcggcaatttcttcctcgcttaccagcagggagttcagttgcactttgtcgaatttttcttcgtattcgagtacggctttatcaccctcaaatttgatgcggtttaatatttcgagtacggtttcccgcaatgattccgtttgaagagtcgggcgtttcagcaagtccgcccatgtatttctttcaggataagtaatgatgttcatagtaacaatctttgtgattaggttctgaaaatcaaagtatcattttctcaataggcagcaccaggatgccttgtgcaccgatggctttcagcttgccgatgatttcccagaaacatttctggtcgagaacagtgtggatgctgctccagccttctgtagccaatggcataatggttgggctctttacaccgggaagaacagctacgatttcttgtaccttgtcggtcggtacgttcatcagcacgtatttcttgtcttcagcggttttgactgcattgatgcggaacagcagttcctgaagtatttccttcttttcgtctgacatgtgcttgtttccgatgagcagcgcttcgctcttcattaccacttccacctccttcaggttgttgctgataagggtggagccggagctgacaatgtcgaagatggcatctgccagaccgatggccggagcaatctccaccgaacccgtgataacatggatgtcggcctcaatgtgctgttgtgtcaggaagtttttcaggatattggggtaggaggtagcaatctttttgtgattgaaccattccagtccgttgtattccgtttctttgtgaatggccagtgacaaacggcatttgctgaagcccagacggtgcacgatttccgcttcttcggcacgttccacgaattcgttttctcctacaataccgaggtcggccacgccgttggccacacattgtggaatatcatcgtcgcgcaggaacagtacttctaccggaaaattactggactgtgtcagcagggtgcgtttggaggtagataacttgatgtctgcttcagtaaacagggccattgtgtcttcgaacaagcgccctttggattgtacggcaattcttaacatattgttctaagtttttaaagtgtcaaataaaaaaggcttaccgaggaataaattcttacggcaagcctttgtgtaatcttatctcttgtaactgcacgcgtcgtcagcctaccgtgtgaaccgttaggtaatgatgatggcgatgatgtacagtatttaaaatcataattatcgttcttttgttgcgacaaaaatattagataagaattaaaaaagcaaatatttatcagaaaaaactcgcttttgctgtcaaatttataaagattccttttctttttccgtataacagcctttgaagtacatttccttttctgctttttctcttgggaaaatgaaataggtgcagacggccttggtgcagacttcatcctgtgcattgtagatttcggcttcaatgaacacaaagttccgtttctgctccttgattcttcctttgagggtaaggtgagagtcggtcgtgtgaatgggtttcaggtattgagtttccatgcgcgaagtcactcccgccgtctgaagcttgcgggcaatcacccaggcacatatctcatccagcagagttgcctgaatacctccgtgcagggtgttcaaccaaccttgaaaacgggcttcaggtacccatttactcacaatctcgtccccgtcttcataaaattccattttcaggcccgactcgttgttgggggcacagccgaaacagaagtatccttccattccttcccatggattgatgattttttccatgatggctgagttttagatagtatagtccacgcaggcacggttttccttggcatctttcagaataccagctgcggctacgtgtgccggatggatggcataagccttcacgtcgtccagcgtatcgaaactgctgtccaggcagatgtcccatacttctgccgggttttcattcagtcctacatgaatgtcacgaataaaggggatagtggccggaagagcctcgatggcagtcttgaaacggttcataatgtcggctttttctgccggagaaagggtttctttcaatttaaataaaacaatgtgcttgaccatgtttgtttgtttttatgattttcgtatctttgaatattgcaaatatagaaattaattattgaaacaagttatgattatcattggaattgcaggaggaacaggctccggtaaaacaactgtagtgagaaggattatcgaaagtctgtcggagaatgaagtggcagtgcttccgcttgattcatattataaggacagcagtcatgtgcccgtggaagaacggcagaacatcaactttgaccatccttcggcattcgactgggatttgctctccaagcatatctccatgctgcgtaacggagaatccattgaacagcctgtatattcctatcttacctgtacgcgccagaaagaaaccgtgcatgtagaaccccgtaaggtcatcatcatcgaaggtattttggctttgagcgaccgcaggttgtgcaagcagatggacctccgtatttttgtggatgccgatccggacgaacgtctcatccgtgtcatccagcgggatgtgatagaacgcggacgtacggctgaggcggtgatggaacgttatgtgcgtgtgttgaaacccatgcacctggagtttatcgaaccggccaagcgaatagccgacctgattgtgccgcaaggaggtcataatgaaaaggccatcgagattctgaagatgtacattgaacgaatcgtagacaaatgaaaggctggataacggggctgtgctgtgtgctggccttttttttgtttttttcatgcggctctgagaaaaaagcggaagagactgccgtcgatttgccacagattcaggaaagaaaggaactggtggtgctgactgtcaacagctctgtgtcttatttccattaccgtggtgaacccatgggattccagtacgaattggcccagcagtttgccaagtcgctgggactcgacctaaaggtgaaggtcgtaaaagacgaagagcagctggtgagcagtctgctcaaaggagaaggtgatttggtagcctacaacctgattattaccaatccgctgaaggatagtctgatttattgtggtgaagaagacattacgcggcaggtaattatacagcggagagggaagaaagctttgaaggatgtcacggaactggtaggaaagaaagtctatgtcaattccggaaaataccgtacccgtctggagaatctgaaccgcgaactgggaggaggaatcgatatttgtgagatttcctccgacagtgtatcgtcggaagacctgattacgtgggtggcagaggggcgtattgactacacggtagctacagatgaaattgctcgcatcaaccgtacctattatccggtacttgacatcaacttggccatcagctttgaccagcgttcttcgtgggccgtacgaaaaacttcacccttactggcagaagctgccgataaatggcaccgcgagaacatcaattcaccggagtttcgtgccagcgcccgccgttattttgaattggccaagcgtcccgcacatggagccattctttccgtgaaagacggtaagatttcccactacgatgatttgttccggcgttatgccaaagaaatcggttgggactggcgtctgttagcttcgttggcctataccgaatcgaacttcaatccgaatgtcgtatcatgggctggggccaaggggctgatgcagctgatgccggctacggcacgtgccatgggagtgccgccgggcaaagagcaggatccggaagagagtatcaaagctgccgtgaagtatattgccggaatgcagcgtacgtttagtaaaatcacggataaggaagaacaggccaagttcatattggctgcctataattccggtatcggccatgtgaccgatgccatggcattggccgaaaaatacggacgtaaccgctacatctgggagcatcatgtggcccactttatgctgttgaaaagcaacaaggaatattatcaggatcccgtttgcaagaacgggtatgcccgaggaagcgatacctatgagtttgtacacgagattctggcacgtgcggaactttaccgaaagaagataaagaagtaaacaactgaaaagttgggttttataaatagcctgaagtttttgcggaagcttcaggctatttttttacgtttcccgttgcagaaacgtaagtttctcagtgcggaaatataggtttccctatcggaaaccgtacggtttatgtgggggaaacgtagaaaacttttcagcagtctgctttttcttttaggaagtttgcaaaatataataagttacattatttcctaatcattttaaagttctacaataagcagatagctaaaagaagttttctgcttgaaaaaaataagtttttctttggcgctgtataattatattcgtaattttgcgaacaacaaacaaaagaggtgaaaatggtaagaaagaactattcagaagaacaggaaaaaatggcccgctttgccaaggccatggggcatccggctcgtatagccatacttcaatttttggcctcacaggaatgttgctttttcggcgacattcatgaagaactgcctatagccaaggctacagtgtcacagcacttgaaggaactgaaagaagccggactgattcagggagagattgaagcacctaaggtgaggtattgcattaataaggagaactggaaactggccaaaaaaatgtttgccgatttcctgggccagccgatatgtaaaaaagagagctgttgcgaataagctcttttttttgttgtgcttgttcgttgttttgcgaattactaataatagatatagaagaacgatgaaaaagatggtatgtcttctgtcagtatgcttggcattggcctcatgtgggatgcagggcagaagtgaaaaagaaattcagacaagtgacaaagcggtggtcagaaacagtgaggtaactgccaaagaccatgtagaggtattgtattttcatggaaagcagcgttgtgctacgtgtatagccattgaaaacaatactctggctgtgatgaaagagaatctttcggagcaggtaaagaagggggaagtggtgttcaaggtgatagacatcagcaagaaggaaaatgagaaaatcgccgaaaaatatgaggttacctggtcgtcactgtttgtggttggttataagaacgggcaggagactgcggaaaatatgactcagtttgctttcggaaatgcccgtaaatcgccggaggtgttcaaggaaggactggtgaaaaccataaatgacatgttgaaataataaggagaggctatggactggttacagacattgttggacaacagttccactcctgtatggacggcgtttttgcttggactgctgactgcactttcgccttgtccgttggcaaccaacattgcggccattggctttatcgggaaagatattgagaaccggaggcgtattttctggaacggactactctatacgctgggacgtattctttcgtacgcgttgcttggagtggtgttgattctggttctgaaagagggctcgagcatgtttggcatacagaagaccatcggagtgtggggagagcttgtgttgggcccgcttttgttcctgataggccttttcatgcttctcggtgataggttgaacttgcctcagttcggatttcagggtaatgcggaagggcttgcccggaaaggcggttggggtgcgttgataataggcgcgttgtttgccctggctttctgtcccacaagcggtgtcttttattttggcatgctgataccgatgtcggccacggccacagcaggttatctgctgcccgttgtgtttgccattgcgactgccataccggtgctggtcgtggcgtggattttagccttcagtgtacagcagctgggcaatttttacggcaagatgcagaaggtgcagaaatggatgaaccgcatagttggtgtgctgtttatcgtcatcggcatatattatagctggataatgtatttataaacgaatttgataacaaacaaaatctttacaagtatggaaattaaagtattgggaccgggttgtgcaaagtgcaagaccacctataatgtaattgaaaaagtaatcaaggaaaataacctggacgtgaaactgaccaaggtggatgacatcatggaaatggtgagctacaacgtcatgacgactcctgccgttgtggtagacgaagtagtgaagatgaaaggacaggttcccaccgaaagcgatgtgaagaaacttttagggatcggataaacaagaggattgattcagaagcggcagaaacgaccttcaaggcagctgccgcttttatgatgggatacttgttcgtatttaaacgaattataacgatagaaacatgatacaagattttgcagactggcttgtttacggattgttcggactgagtgctgatacgccgcttggggtagccgtaaacttctttttttatgataccatcaagattcttattctactgttttttatcagtgtgctgatgggaatcattaacgcttattttccgatagaacgtttgaggaactatctggtaacgcataaaatgtatgggttgcagtatgttctggcctctattttcggagccattactccgttctgttcctgctcgtccattcccttgtttatcggctttgtaaaaggcggtatccctttgggagtgacgtttgccttcctgattacttctccgctggtgaacgaggtggcggtggctatgttcctcggctcttttggactgaaagtcacacttatctatgtcatcagtggtattctgctgggagtgataggaggttttgtgcttggccgtatgcatctctcaccttacctgagcgactgggtgaagcagatacaggccagctcctcggcgcaggcaggagaatgggagaaagaccataccacttttatcaagcgtcttcccgtcattgtgcgtgatgcctggaagattgtcagtggtgtactgatttacattctgataggtatcggtataggtgcgtttatgcacggctttgtgcccgaaggatttttcgagcaatacatgtcgaaggacaactggtttgccgtaccgctttcggtcattcttgccgtgccgatgtatgccaatgcggcaggcattgtgccggtcatcgaggtattcgtagccaaaggtattcctatgggtacagccattgctttcatgatggccgtggtgggtctttcacttccggaagcgactttgctgaaaaaggtgatgacgtggcggctgattgcgatattcttcggaacggtggctttcttcattatcttgtcgggttatttgtttaattttgttctttaatttaccatttttatatgagagtattgattctttgtacaggaaatagttgccgcagccagatggcccacggctttttgcagtcgttcgataaaaatatagaagtgtattcgggtggaacagagcctgccgcacaaataaatgccaaggcggtggaggtaatgaaagaagtcggaattgacatcagttcgcatgtgccgactcatgtgaatacctaccttgatcaggaatgggattatgtgattaccgtgtgcggaggagcaaataaaagttgtccggcatttaccggaaaagtaggcaagcgtcttcacatcggttttgacgacccgtagcatgccaccgggactccggaatttattgaagcggaattccgtcgtgtgcggaatgagattaaaaatgccttcgcccgtttctacattacggaaatccgaaaagaagaattacccgcctgctcttgcggaagttgcggttaatatgcgtattctgttgtatcgtctttggttttgcgataaatcgtaatatatcagatgatttctttgttatttcatcatttttttcatagtttcgtcactatgaaaccaaacttaacaaagttgaatatgacagaatgggataaaatgcaggagcatcaaatctataatgattttgatgctgatttgtttaacctgagggttaaggcaaagaagctgtttaaggagtttaaccgtactgaagatgaagaagtagaacgacgtcaggaaatcatgcacaaactcttcaagaaagtaggggagcgtgtgtggatggagccggactttgcttgcgaattcggcaaaaatattacgattggcaatgatgtttatattaacttcggatgtacgctcctcgattgcgggcagataacgataggtaacaatacgttgttggggcccaatgtgagtatgtattcggccaatcattcgcttgatgcggcagagcggatagcaggtgctttgattcctgaacccattaccataggcaatcgggtctggattggaggcggcagcactatcctcagtggagtgacgataggcgatgataccgttatcggtgccggaagtgtcgtaactcatgatatcccttcgggtgtcgtggcagctggaaatccctgtcgtgtattaagaaaaatcacggataaagataaggtgggttttcccgtatagcagattgtttttccatataaggaaaggcatcacgatgaggtaatcttccaaaagcggggtgagttacatattgtctaattataaaaacaaaaggctgtttcaaattacattattctaatttgaaacagcctttttactgctttctctcagcaaataaatataggctaaaaaaacgcctttgcgttttaattaaaacacaaggatgtttagattaaaacgcaaaggcgtttgacatgaaatgtacttgcgtttgagataaaacgcacttgtgtttttggaggagaataaaacaaatgaatcaattttacttttaatttaattaactgtttgaatatgtattatttacgataaattcgtagatttgcgaaaagttcgtagaaaaactcgttcgatatggaaaagctaacttatcaggaagaagaagccatgcgctttatttggaacttgggaccatgttttgtgaaggatgtggtgggctgctatgctgaacctaaaccaccttataccacggtggcctccattattaacaacctgaagcggaagggatacctgcaggcagagaggtttggtaatacttaccgctatactcctttggtggctcaggaagaatataccagcaagtctgtgggcaacattgtgcgcaattactttgccaattcttataaggagatggtttcgttctttgccaaggagcagaagatttccaaggaagacctgaatgagattatcaacctgattgaaaaacgtgaagacaaataaaaacttatttctatgctataccttcttcaagtcaatgtcggattaatcctgttttatgcactctataaactggtatgtacgcgggataccttctttcgttcaagaagatttatcctgatagtgtcgcttgtattgccatttatcctgccttttatcgacgtacgtgaatggctggaaagccgtgaccgcatgattatgctcactcactttgattactcggcggtgttgccggagattgtggtgggcagtgaagcagtagaaaccgggaaccgtgtattcgtactgtctgaatggataggctatctgtatcttgccggggtagtggtattgctcgtccggcttgcggttcaggcgttcagtctgtatcgcctcattgtgcgtatgccggaaaaagagataaacggcgtccgcgtaaaatgtttgaatgacccttccggaccgttctctttcttcggatggattttcatgaatcctgccgcggtgaaggaagatgaaatcaatgaaatcctgacgcacgaaatggcgcacgtaaagcagcatcattctgttgatgtacttcttgccgagatggtcagcatctgctgctggatgaatccctttgcctggctactgaaacgcgaggtcagactcaacttagagttcctggccgacaggaaagtaatggaggcagggtttgctactaaaagctatcaatatcacctgcttgggttggcctacaaccacaagtacgggttatccaataatttcaacttctctcaccttaaacaacgtatcattatgatgaacaagaaaaaatcaaatgctacagggcatatcaaatatgcgctgttcgtgcttccggcctttgctctactcgttgccggaaacatctcctgctcgcagggagcatccgaaaaacaggatgccaaagaagaaaccgttgcaccagattcagtagcggctcctactgacggtgtagcgaaagacgaagtgtttatggttgcagaacagatgcctgaatttccgggaggaatgaaggagttgttgaaattccttcaggacaacctgaaatatccggaaaatgccatgaagaataatgtgcagggacgggtaatcgtgcagtttgtggtggaaaaagacggaactcttaccgaattcaaggtggctcgttctgtagatccggatttggatgcagaggctttgcgcgtgttgcagaccatgcctaagtggaagccgggcatgcagagggggaagatcgtaagggtaaaatttaccgtacctgtttccttcaaacttcagtaaattgtgtttgagtccgctttaaaaatgggctgtaattatgcttaaatgcttctgagagaagttggaatgtaatcctgtattttagagcggactcattttttagaaatatgataccatgaaattcacagcaatattattttcctctctgttattgggattgatgatggggagttgccattccggacagaaggtttcggaaggtgaattcctgatagaaggatttgtgaagaatctgcccgacagttcaattgtttccctctttcagtttgaaaacagacagtatgcggccgctatgctatctgatacggttacaggtggcaggtttgtgttaagggataccattacttcaaaggaatctcggcagctgttgctattagtaatctataagaagacattttcagtgtggccgctttctctatgggtagtttccggagcaagaatccggattcagggtgaaggtatgctctgtccgttctggacggtagaaagtgaggtaccggagcagcagacggaggctgaatttaccaagctgggaatgccggaaatggtggaagcctttaagcaagagatgatagtatatgaaatgtttgacaagggcataaatgatgtttctatccgaaacaagattgattctatccgtcggaatcatatatatcctctgcaagacaaagttcggttgcgggaactggaatacatgaaaacggctccggtcacaaaagtctggctggaaaagtattgtgatcaattgtctttcctcaattggaacaccgattctcaatattcccataaagaattggtttatccgttgtatgcacgtctgtctgaagctgaccgcaagtcgctggtaggacgtgaaattgcagcttattttaagatggtagaatcggtaaaggcgggcgaccacatggtagacggcacgctgtatgatacggagggaaatacacatcatctctctgagtttgagggtaaatacattctgcttgatttctggaacctcggttgccagccttgcatggaggcactgcctgaaatggaagaagtgagtcgtatgtataagggaaaactggaactggttagcatttgtggagccgcgaaaaacagatggaagaagtttgtggcagaaaggaaactgaccggccatcaatggaatgaacttcgtgaggtgaatgacggacttgcagcggtttatggtgtaaagggagttcctcattatgtgctgatttcaccggaacgtaaggtgatacatagctggatggggtatcgtaaacatatcctgaaagagaaaatgaaagaattaattaaataaaataggaaaaagatgaaaactcaaaatctacttatggccgcattttgtatattgatatctgttagttgtggcccgcgtaccgataaagaatatttgtctgacgtattacagaaaatgaacaaggttgaatcagtgagttataaggtcgttagacaagcttggttgccaggggaaaaagatcctgtttatacaataacatccgaagtttatgaacatattaacccacaagatacggctataggttcatcttttgtagagtttcaggacaatgcctttcgtggtgtatatgatggaaaagtgtcctcttatgtttatgaagaggagggggaaaaatggattcgggaagatgattttacaactaaaagcccgcttcctttccgtatggttatgcctgaattcttttactatactcagtcaattcttaaatacgcaattactacccaggactctatagagctttccttgaaagatttgggtgatgattatttgatggaactgaccattcacatgcctgttcaggtggagttttttggtaaagctcgttatatgccgcagaatccgtatgtatatgatccgacgtctgtctacaaaatctggatctccaaaaaagatgacatgccatatcgttatcggagggaaatggagggtaacatgaatgaagcttcttgttctgactttatctataacccggttgataaagagtgtattgtagcgacaaattattatccagaaggttttgagattgtaaaaaaaaggcagcgatcttcaaaaccaactgtggatatgacgggtaaaaaagctccagactggacgcttactgatatgaagggtcagaaggtttctttaagcggtataaagtcgaaggtcatcttgttgcagttcacagggataggctgcggaccatgtaagatttcgatacctttcttgaataggttgaaaaaagaatatgcagtgaacgagcttgaggtgctggctgtagaaacgtggggaaggtcgaagtcgtcttgcgaagcctatgtgaaaaatcagggaatagaatacagttttctgactgccgataaggaaacaatagctaaacttataaatgattatcaggctggtagcggagttccgcagttttacttgataggtaaagaccgcacgataattgcaaagttccaaggctatgcggaaaagacaacggacacggagatagaaaagaagataaaagcgaatttgtagaccaaaaaaacgtattctctccaatccttgcattttctgtagatttttctatacatttgcagccgtacatttaaacaaagaaaaaacagatgcatcgtatcactccctgttcgcaaaaggtcatgcttcggttccgtcgctggagccggaaggaatatgctgcgtttgtaagtctgcaccgccatgtcaccatcggacaggtgggacggggaattgcagatgcttcattgggcaagcagaaaacggcagtgtgcgagggaaagaaaacagaaggcatgtcatggactgacctttcaggggaagatgcactctttggaagtggaggaccggggcttggaggaagtctattcgagacagaccggacagaattgtggcgtctgctggtgccgcaaagggaagaagtgcctgcactgcttttagatgaaataaataagataacaataaccggaagggatgtctccgcttcaggtcaagtctgacagacttaaccgaagcggatacatcccttcttttttaggataaatacgtatggaaagattacagaaattagaagagaagataaaggaagggggcatgcttacttcggaagaggctttgtggctgctcgaggaagcgccttttgaggagctgtgtgaggtggctcaccgcattacggtggcatacgcttcacggaagtttgatatgtgttccatcattaacgccaagtcgggtcgttgccctgaaaactgcaaatggtgtgcccagtcggtgcatcatcacacgggggtggaggagtacggactggtgagcgaagaggaatgtctgcgccaggcaaagatgaacgaagaccagggtgtggctcgtttctcgctggtgaccagtggtcgtcggccttcggcgggagaggtagagaaactttgcacgcactttgcatatcttcgggcgcaaagtaagattgaattgtgtgcgtcgttaggactggctacggaagaacagcttgcggccttgtatcgtgccggggtgagccgttatcattgcaacctggaaacggcgccttcgttcttcccgaccttgtgttccacgcatacgcaggcacagaagatagaaacgctccaggcagctcgccgggcgggtatggacgtatgcagcggaggcatcatcggtatgggagaaacgccggcccagcgggtggaactggcactgaccttgcgggaactggaggtacagtccatcccgttgaacctgttgcagcccatcaagggtacgccgctggaacacgcaaagccgctgacggcggaagaggtgctgcgtacggtggccatgttccgcatggtgaatccgacggctttccttcgctttgccggagggcgctcacagctgagcgaggagacggtggaccgtgcgctgtatgtgggaatcaattcggccattgtgggggatttgctgaccacccttggctcaaaagtaacaaaagacaaagaacgtataaaggaggcaggatatgaattgtgagaaattgtttgacgaatttgaccggtcgcatttgtggcatccgtatacttcaacttcaaacccgttgcccacttacaaggtggaacgggcacagggttgtaccttgacgctggccgatggtacggaactgattgacggcatgtcgtcgtggtggtgtgccgtgcatggatacaatcatccggtgctgaaccgggcggtggaggaacagcttcaccggatgtcgcacgtgatgttcgggggactgacgcacgaaccggctatcgaattgggaaaggaattgctgaaaatcgtgcctcccagcatggaatatattttttatgccgacagtgggtcagtagctgtagaagtggctttgaagatggcggtgcaatatcagtttgcggcaggtcatccggagaagaacaattttgtgaccatccgttcgggctatcacggcgacacgtggaatgccatgtcggtatgcgacccggtgacgggcatgcacagcctgtttggttcggcccttccggtgcgctattttgtaccttctccgcagtgccgtttcgatgccgaatgggatgagaaggacatcgaacccttacgtgaagtcatcatgcagcatcacggtgagctggcgggactgattttagagccgatagtgcagggggccggaggcatgcgtttctatcatccgcagtatttgcgggaggcggcacgcctctgccgggagcatggtatgctcctgatttttgacgagattgccacaggcttcggacgtacggggaaattgtttgcatgggaacatgcgcaggtggaaccggatatcatgtgtatcggtaaggcactgacaggagggtatatgaccttctcggcggtgctggcttcggcaaaggtggccgactgtatttcttccaaggagccgcgtgcgttcatgcacggtcctacgtttatgggcaacccgctggcttgtgccgtggcactggcttctgtgcgtctgttgttgtcgtcaggctggcaggagaaggtgcgccgcatcgaagcacagttgaaagaagaactggcaccggcggcttcgttgccgcaggtggccgatgtcagggtacagggtgccattggagttattgaaaccaagaagccggttgacatgggctggatgcagcgtcggtttgtggaagaaggtatctgggtacgtccgttcggacggctggcctatatcatgccgcctttcatcattcgtccggaagaactgacgaaactgacgagcggtttgtgcaagattgtcggcgaaatgccggaataaaaacaaaggaggtaaatcatggaaaatgaaatacaacccggactggacggagattttcagctggaactggataagctggaggcgtgtggcaacctgcgtgtgttgccggaaacctgtagtgaggggaaatggattgaggccggtggacggaggatgttgaatctgtcgtcgaacgattatctgggactggcttcggacaaggcgttgcgtgaggaatttctgcggacggtgaaggagagggatttgtgcttttcttcctcgtcctcacggttgctgacgggcaacttcccggcctatcgggaactggaatcgctgttagcttcgttgtttggagcggagagtgcactggtgttcagcagcgggtatcacatgaatacggggattcttccggcggtgaccgatgcgaacacactgattttagccgacaaattagtgcatgcgagtctgattgacggcatccgcttgtcggcggccaagtgcatccgttaccgtcatcaggactatgcgcagttggagaatctgctggccaagcatcacggcgagtatcaccggattattgtagtgactgaaagcgtgttcagtatggacggtgacgtagcttcgctcgaccggctggtggaactgaagcgccgttatgccaacgtgatgctgtatgtggatgaggcgcacggcattgccgtacggggccagcgaggactgggggtagccgaggaacaaggttgcctgaaggacatcgattttttgtgcggtaccttcggcaaggcgatggcttccgtgggagcgtatgtggtgtgccggaaggtgatacgtgattacctggtgaaccggatgcgcacgttgattttcactacggccttgccgcctatcaatgtggcatggacgcgctttgtcttgtcgcacctggaagatatgcaggcacggcgggagcatttggccaaaatctcagcaagcctgcggacggctatccgtgagagtggggtggaatgtccgtcggaaagtcacattatacctctggtagtgggagccaacgagaaggccatctggaaggccttgcagatgcaggaacatggcttttatgtgttgccggtgcgtccgcctactgtacccgagggaacggcgcggttgcgtttctcgctgacttcgctgattgaagaagaggaaatggcacggttgtgtcatgaaatgaaagcatgaaaacagaaagaaattaagatatgaaacaacggtttatcaagaaggaaggaaattctacattgctgctcttctttgccggatggggctcggacgaaaatctgtttgccggaccggtgcaggagggatgtgactgcctgttgtgtttcgactataaggatttggattttgactacagtctgctgggggggtacaaggagatacgggtcatggcctggtccatgggggtatgggtagcctgccagacattggccggaaaagaatatccttatgggatgaggctggcagtgaacggtacgcctttccctattcacgatacagaaggtattcctgaagctatctttcagggaacgctggagaacttttcggaaccggtgctaattcgtttccgtcggcggatttgcgggtcggccgcacaggtgaagacattcctatcgcatcatccttatcgggaggtagacgatttgcaccaggagctggcggctttgtggacggccgtaaagaatcgtccggctgtggagtggacttgggacaaggcggttgtcgggatgaacgacaagatattcccgcctcagaaccagcgcgaagcctggcagggagtggccgtggaagaagtggatgcggaacactatgacgaggagttgttccgtgagttgctgaacggagaaagtcgcttatggacaaggccctgattagtcggcgctttgccaaggccgtggggacttacctggataaggccgacgtgcagcgttacgtggcatcccggatggcggaactgaccggtcgttacattccttcggatatacaggaacgggtgctggaaataggctgcggcacgggcatgttcacgcggatgtacttgcagcaggctgtaccggaagaaatgtggctgaacgatctttgtccggaagtggaaccttatctggcggatgtgttgggtgaaaaggtgcatttcatggcgaaggatgcggagacattagcttttccggaggggcaggacctgattgtatcgtgctcggcggtgcagtggtttgaagatttgccacgtttcttttcaggatgccggaagttgctgcacgaagggggatacctggctttcagtaccttcggtcctcacaatacggaggaagtggcgacactgaccgcggcgggattgtcgtatccgtcgctggaggaactgaaagagatactggcagcacgctatgaggtagtatatgctcacgaggaacagttacgtctgtcattttcttcccccttggacgtgttgaagcatttgaaggagaccggagtgacgggtacggctgcacagccatggacacgcggcaggttgcaggagttctgccggaattatacgagacaattttcggatgaacggggaaaggtgtacctgaccttccatcctatttatatgatatgtagaaaataaaaaggttacgagtatgaaaaagaatgtatattttgtcagcggtatcgataccaatatcggaaagagttatgctacggcttacctggctaagacctggaatgaacggggtatccgtaccattacggagaaactgattcagacggggaatacggacatgtcggaagatatcgagctgcaccgccggattatgggtaccgacttgttgccggaagataaggaacgattgaccatgccggagattttttcttatccctgttctccgcacctggcagcggagatagacaagcgtccgattgatttcgacaagattgaacgtgccactcagacactgagcgaacgctatgatgcggtgttgctggaaggagccggaggactgatggtgccgttgactcgtgaactgctgactatcgactatgtggcacagaagcagtatccgctggtgttcgtcacttctggtcgcctgggaagtatcaaccacaccttgctgagcctggaagcgatgacgcgtcggagcatccgtctgcacacgctggcctacaacctcttcccggaagaagatgatgagattatccgtcgcgatacggaggaatacatgcgcgacctgttgaaacgggaatatccggaagcagagtttgtggtggttccgtttttgggtactaaataaatgggtcggtgaaacaaggatattatcacgtgatggccattgccgtggtcgtggtgtggggactgacctacatctcgaccaaggtactgattcagcaggggctgcatccgcatgagattttcttctaccgttttctggttgcttatgcgggtatctggctgattgctccccgtcggctactggcaaacagttggaaggaagaaggcttgttggctttggccggtttctttggcggctcgctttatttttatacggagaatacggctttgggactgacgcaggcttcgaacgtggcgtttctgctgtgtacggccccgttgcttacggcctttctctcggcggcattttataaagaagaccgtttgacccgacggttactgatgggctctatgctggccctttgtggggtggggctgattgtgttcggtgggaaggagggtttgaaagtctctcctgcaggcgatttgctgacgttatgtgctgccttctcgtgggcttgctatagtttggtcattcgtcgcttgtccggacgttatccggtgtcgtttatcacccggaaagtgttcttttatggggtacttaccattctgccgttatttgccgtatttcctttccggcagaatacggccatcttgtgccgtcctgaagtgtggtcgaacctgttgtttctggctctgatagcttcgttggtttgctttgtggcctggaacgtggcactaaagaaaataggggtgctgcatacttccaattatatttatctgagtccgctggtcactttgggagcttccatgctgattttgggagaaggactgaccttatgttcggcagtaggtgctgtctgtattctgtgtggtgtgtactgggcggaaaaaaggaaatgaagcatacagatgctgggagaagtttagggaaatccctacctcgaaatagggatttcctgcttgatagggaaaaatatcttcctaattttgtatcagcataaaaaggtagaaccgttaaatgatataattatgatgaaggtgaaagtatttgcttcgttgatgttggctggcttgccattcgttttggcagcccagagtaacgacgacctttacttcgttcccaagaaaaaagcggaaacgaagaaggagaccgtagcggccccgaagcagaatagtcaggggacaacggtgtattccacatcggctacttccacgccggtagtagtgaaggatgtggctggaaatacgcgtgatgtagacgaatacaaccgtcggtacacatcgcgtgagaacacgttctctatgcagaacgatacgctttacattcaggaaaaaccgtatagcgaacggggagagtgggtgaacggatttgaaggtacgcaggatgactacgaatatgccatgcgtattgtccgtttccgtagtccgcgctatgccattccggtaagcagtccgctgtactgggacgtagtgtatggagctttcccgtcatgggactggaacgtatacgatgacggactttatgcttacgtattcccgacttacagcaatccgctgtggtgggactggagatggaactggagcattgccggaccaagattcagctttggctggggatggtcttctccatggtattacagcagctggtattctccatactggtatggtggttactggggaggctactgggccggttactggggcccgggatggcatcatcatcacccgtactatccgtcgtatggatggggaggaggatggcatcgtggatatacagactatcgcccgtcacgttatcagaattatacgacttcccgtcggcagaacatggttcaatcaggaacaatcagctcccgtcgctcaggggatgctttctctacccgttcagccggaagagtggttcgtcctaatgaagttcgttcggtcagttcttcagtacgtcccggagttggaggaggatcatctgtcagacgtgaaggaatctctacaggtagcgtaactcgttctgaacgcaataccggattatatacacgtccaagtacgactattaatcgttctggttcctcttcttatacacgtccgagcagtacacgtcgcagcgtgaattataactacaatgataataacagtcgagtaaatcgtagtgtacgttctgatttcggttcgtctagtcgcagtggtagtttctcttctggtggaagcagtacccgtggctctatgggcggcggaatgcgctctggaggcggaggtggcagctcacgtagacgataagaaaaatgaagatgtacttataacttttggataatatgaagaccagaataatcgcattagctgttacggctgcttgtgcttcagcagctgtagcacagagtcaatacgaagctctccagtttatgggaaatgagttgaatggaactgctcgttttgtgggtatgggtggtgctatgagttctttaggagctgatttgtcaacgatgtcaacgaaccctgcgggaatcggaatgtatcgcagtcatgatgtggcagtaagttttggatttaataatacacgtaccaatgcagattttgcagggaatacaacaaaagagaatcgcacccgtgcttcgtttgaccagataggatttgtgtggagcaccaaaattgggaataagacggatttacgttatctgaatttcggatttaattaccacaagcgtgctaattttaaccgtcagttttatgctaaaggagctttaaatggagcctccatgacatatcagatggctaatatgataggaaatgcaggatatacgactgccaatggttttaatggattgcttgatgcaggctctgatgtagacaaccgtaatccgtatacacattctgatttttatagtactccttatttagccatgatgggagctcgtaccggtttggtggatgcaaattgggataaagatggaaacattactcaaatctttggctggaatggagaaacaggtgagtattatagccgggaagaaggaggtattaatcagtatgattttaacttgtcatttaatatacgtgaccgtttctactttggcttgacattgggcttgtatgatttgaactataatttgtattcatcgtatggtgaaacaatgaatagaaatatgcaggatggaagtgtgacttatcatgacaaaggtgattttacactgaataactggtataaagcggaaggtacaggagttgatctgaaactgggaacgattattcgtccgtttgaatattcaccgttccggtttggcttggccattcatactccgatatggtatacattaactgatcgttatactgctgccatgacttctaatattgcattggatggaaagaatcctgtttcttattcagaaaatttatcagactatttttatcctgatatgaattatgtatgggattacagtatggttattccgtggcgttttaatataagtgctggaacgattgtgggtggaattatggccttagatgcagaatatgaatatgagaagtattcatctgctaagttgaaagatagagaagggtatgaattaaatgcaacatcttctatcagcgagactttaaagggggtacatactttccgtgccggtatggaaacaaagttgacagatgcattcagtcttcgggtaggatataactatcagtcttctcctattgtggaagatgcatttagaaacattgaagcgactgacaatacgcgtacggtggcttcctatatgaatccgaaatctcgtcaggctgtaacctttggcttaggatatagaggacggcttttttatgctgatgtagcttataaatatgatttctacaaatctgacttttatatgtttgatgatgtagcactgcaagctacaaaagtaaccaacgaacgtcatcagttattgcttacgctgggcgttcacttctagaagttcattgtgtttgttttatttaatatgggagttgcttttattcactggggcggctccctttttattcctttttttcacggtattctttcttcttccagaaattgaatcccatgtagatgcgcaggcttccgaaagaattggtcatagagaaagtgggtttccggtagtcgtatgtgtgaagtactagagaggctccgacatagtatttgctgttgttccaagtgatgcctgcacgcgtaatcaggtcgaaattgatgtctcttatccattgtgcccagtcagttccgctttgggtgggctggtcgttgatacgtgcctttttataggctatggccggaagaagagagatgttcagcagacagtttctggcaaacacccagttatagccgtagcccacgctgaggttgtagtcggtgtagcgcaggctgtgaaatttcagggaggggctgagctgctgttgcatttcttctggcaattgtgtatggtcgaaggaaatgttatgctgggaataggagaatccggccagcagggaaccgcagcttttccgctggttggtcgactggctataggctgcaggataggaaaatcgcttgtggttgaaaatccagtaggcattcagtcctttgatgttgctttgaaaaccgttgaattgtgtgttcgtatagctttggctcaggttaaacttttcataggaagacagtttgaagtcgctgcccgttttccggtaatacaagtctacgccaaatttggcactgtataagttgaacacaatttcttttcggggagctttttccttgcctttaccaataaggtccttgatgtcgaaagaaagtcccaggaaaatccatctccagccaaaataaactcccagcttggtgttgatgttcggggcaaagttcagactttgtccgtcgttgcttcctaatcggtaatgctcataccaggaactttgctccagcataaaggccaggttgtatttgttgggagaaatgtaggtggtatctatggtattcagtttggcaccggcttttttgatttcttctccggtgaatttgatggaacggacaatgccgtcggtcagactgcttaatgacagtcggggagaagccacaggagccggttcattgattgacatgctgtctttcttctctatctgagccatggtgtgagtcggatagagaaggagtatagacagtatggtcaacaaggagagtggtttcaccccaaataataatgtattggttaaagtttgttcagaatgcggtccattacccagttggtaggagtggcactgactccgtcgcaggtgcagactgcctttccttgcagatgctctactaccgctttaatcaaagggagctgtacatgaggagggttaggaggcaggatttcttcacgtccgcgttctgtatgcaaggctatcgggtcgtaggtgaagacggagaagcagatcatgcctttgtctccgataatttcaatacggtcttccttggcggagtcgtgggctacaaagcaccaggaacctgagcccggcagaccggagtcaaacttgaagcaggcactgattgtatcttcagcttcatacagcccgccacggttggatttgtagccttctgcttcgagaatacatccgaacatatcctgcaataaatcaagctgatggggggcaaggtcgtagaaataacctccacctgcaatatcgggttgcacacgccacggcaaattcttggtgttgtagtcgagtgcacgcgggggctgtgcaaaacgaatctgcacgttgataacgttaccgatttcaccttcctccaccaactggcggactttttggaagtagggcaggtagcggcggtaataggctacgaagcaaggcactccggtctctttcgagatacggttgattcgtgcgcagtcttcatagctggcagccatcggcttctcgatgtacaccggtttgccggccttcattgccatgatggcaaatgtggcatgcgaagaaggaggagtagcgatgtaaatggcattcacatcttcgtctccaattaactcttgtgcgtcggtgtaccatcggggtatctgatggcgtatggcgtaggatttggctttttcttcgtcgcggctcatgacggcaaccacccgtgagccttctatcatgttaaaagcgggtccgcttttcttttcggtgacttcaccgcatccgatgaatccccagtttactttatccagtttgatcatagatgagtggttttagtgaaagtattttttatataatttctgatagtcttcgcttttcatgtactcgtcgagccattggttcaggctgtcgagcagaatgggagaatgtttggctactccccatgcgtagaattgggtgaaactgatatctgtatcaatatccaggttgggatataggtgcatgtttgccttggcaatgttctcgtcgcacacggcatagtcaatatctcctccggaaaccatggccatgagttgttcaggaccgtattgttctatttcctgaatgtagatggtgtcggctatctcgctgatgaggttgtgaagacgcagcagggcaggagagcctttgaccacgtgcagggttttatgtcctaattccagctggttgtgtatgtacagactgtctttcccttcttccggtttgcgctgtaccagtacctgtttgctgagcagcaaagtgtgactgaagagaagagagtctttggagcgggtagtcacggtcgtttccgtagcaatcaggtcgtacttccctttgttgaggcctttcaaccgttcctcaaagctcatttctggagtgacttccagtttcaggttcttggcttgtgcaaaggcattcagcagttcgtagtcaaaacccgacaggctatccttgtcaacatgatagctgatggtgttgtattccgttactgcacggaggatacctgactcgatgatttccggatagtcgcgcggtgtgaacttcggttcttcttcatggtgtgaacagagccggagtatggcgacaagaataatcaatccgcctgccaggtatagaatttggtttctcttcataggcagagaattaatcaaagaagttccatgagagtcctactttcaggatacgcgggttgagcggatagtgcggagccaggaagtagctcttttctcctgtgcgctgcagcaggttatacatctgcacgaagatacgcgtacgtttcaggtgcaggttgatgtatccgttgatgagagggtatccgccaagtttgtagcgtgtatccggattttgcaggtagaactgtccgatagccggagcatagtcgggtgcgtaatattgtgtgaagtaccgcatgtcggctcccatttcaatgctcaacacctttttggccagtccgaaccggatgtataggtcgtgatagagcacaagttccggcaagggaagtacggtttcgttactggtcttttggtaggtgatttcattgtctaagtgaaggatgcccaacttgaagtcctgacgcaggctggcactgaacacctggatgtttccggaatgctggcgtacggccatgtcgttcttgtagctgactacatcgttggcgttggtatatttcactgaagcattgtccaagtacgtatagttggtgatattttctactcctgccttcaactgtgtccgccagcggtcgatgctcagctttccttcaatgcgtgtacgcatgattttactcaagtcattgtcccaccagtaatgtttggagtggaagtgacggtagtagaacgtaggattcaggttcttgatataggcattggcttccagacgtacggtgtcgttgaacaggcggaagttcaagtcaccttgtccttctacactgaactgtccggcatcttctccaatcatggctatttcacccaacacattgtagtgcagtgtctttccctgtgatttgataagctggcctccgatagacaatacattttccttgtgagttgtcggaatgcgtcgtccgggtgtgccggtaatggtatctgtcagcgtaaagttacgatgttcaaagctggcaaagacggtcagtccggctttggcccatttgttgaatccttcccgcagggcaatgccgacggtgttcttgatagagaagtttttggtgatgtccagtgaatcctttcccaggtagttatgttcaaagtattcttcattctggtcaacgtcataagacacgtattttctgcggttgatgtctacgttgacggtatgaatgaagctggttaccggtacgaatacttctttggtaatcgtatcgttttcagtcgtttcatcgcgatagaatcccaagttataccgatgagtcagaaaggcatggtatccggtattgttgttccagatattcgacagattggtcgggatagaatacgtttcgtaggtccggtttccttcggccatctccagcgggttggtgatgtagcggtcgtccgtgatacctccgttttcagccaccttcaggttttcattaataaagctgaaatgcatgtcgtattggtcgccgtgatagtaggcaaagagattaccgttgaacagtgccgtcgactggctgtcgtattttcctcgtccgtaggtgtagtcaatgtcgaatccgaagcctaagcgcttgttcacattcacggcaaagtaagccttgaagcgttcctctccgtagcgtccgtctccctgcttgaagtaggtcaggttggtgaaaggtgatttggtattggtatacaccacatcactgggctttcgtacggtgaaatcgtacggatcggtgaagaaaaactggctgctttctttccgttcaaagaacacgtgtgagatacgcggtgctcccaagttacctaagtaagtataatgtcccgtaggccctcctgtatcattggagttctggaaaccatgttgcagggtatctacctgaacgggggtcatttctccaaagcgtgtgtcgattttccaggcattcagtcccaccggtacggtgctggcatcaatcactgcggttgtatctatcggattaccgtttcggtcatatctgttgccgtccattccggtggccgacattccttgtccgtattgggagatggtgttttgtgccgaaagggccgtacacaccagtatgaatagggttgtaaaaaatagcttcttcataatggggcaaagatacaataaaaatgcgaaaacgggagattgtggctttcaaaaagtagcattggaggtgtcagaagtgaaactccggaaaaagaagcaggctgccaactgcattcctttctgtaaatgcactggcagcctgcaagatagaagtatgcttccggtaaggaatcagacttccttgatgatgtccataccgatgcgtatggcttcttcgttcatcggaatcaggtgatgatgacgctcgggcaaagttttgcgcagggctttcaccacactttcgattgatacgatggggcggattttcagcaaacctcccaatacaatcatgttgaaggtcttggccattttccgttcgttggcttcatccatggcgtcaatgcgatatacatggatgtccttgcgggtaggagggttgatgatgccgtatccgtcgtaaatcaatacaccgcccggttttaccttgctttcaaacttggcaagcgaaggctggttcaggatgatggctgtgtcatacttgctgagaatcggggatgagatacgctcgtcgctcacaatgacagtgacgttggctgtacctccgcgctgttccggaccgtaggctggcatccaagtcacctccttgttttccatcaggccggaatatgccaggatttttcccatggaaagaactccctgacctccaaatcctgctatgataatttcctctttcatataatgtgcaaataattatttattttcggtagtatctttcaggtcgcccaatgggtagaaggggaacatgtgttcttccatccatttgttggcggcttcgggtgtcattttccatccggagttgcaggtagatacgatttctaccaggctggagccttttttctgcatggaacattcgaatgccttgcggatggctttcttagccttgcggatggcagccactgactgcactgactggcgggttacgtaagcggtaccttccagtgtagcggcaatttcggtcatcttcagcgggtaaccatggatttccggaacacgtccgtacgggcaggtagaagtcttcatgcctaccagtgtggttggagccatctgtccgccggtcataccgtaaatggcattgttgatgaaaatgatagtaatattttctccgcggttcagagcgtggatggtttcggctgtaccgatgcaggccaggtcaccgtcgccctgataggtgaataccaggcggtcgggccataagcgcttgatggcagtagccagggcaggtgcacgtccgtgtgcggcttcctgacagtctatatctaggtaattatacatgaacacggcacaacctaccggacttactccgacagctttctcggccatgcccatttcgtcgatgacttcggcaatcagtttgtgaactactccgtgactgcatcccgggcagtagtgcatagggttatcgttcagcaggcgaggcttctgataaaccagattttcaggtttgattatatcttcttttgtcataattaattctcctgtagtttatcgtagaaagaaacgaaacacgaattccatcattttcaggaaaagagaggcaccgcacacataaaagaatacggtcttgtcttcacccagtgtgaagtagagaatgacggaaatcaatgctccaatcataaacagtacgtttaagacggctcttattctatcggtatccatagcttatttctgaatcagtttttccttgatggcttcgattacttcatccgggtcgggcacgatacctcccagacgtccgaaatgttctacgggtaccttacattctacggccagacggacatcttcaatcatctgtccgctgttcagttccacggtcaggatacctttcacctgtttggctctttctttcagggccttgcttgggaacggccataatgtaatcggacggaacagacctaccttgataccttcttcgcgtgcatgctccatggctttctgtgcgatacgtgcgcaagaaccgaaagccacaatcaggtattcggcatcttcggcattcagttcttcgtagcgtgtttctttctcttctatttctgcatacttggcctgcaggtgcaagttgcgctgctccatgatggccggatccagttccagtgaggtgatgatattgggcttacgtcccttgcaaccggttgtagcccaagggcattgtgccagaatctcttcttctgtacgtctggggcgatattccggaagcactaccttttccatcatctgaccgattacaccgtcggccagaatcatagccggattgcggtatttgaaagccaggtcgaaagccagccctacaaagtcagccatttcctgtacggaagccggagccagtgcaatcaggtggtagtcgccgtgaccgcctcctttggtagtctggaaatagtcggcctgactgggctggatagtacccagacccggacctcctcgcatcacgttgaccaccagacaaggaagttccgcacctgcgatgtaggagataccttcctgcttcaagctgacgcccggactggaggatgaagtcatgaccatttttccactgccggcgcctccgtataccatattaattgctgccacttcactttcagcctgaagaactaccattccggtagtttcccacggcttctgctcggcaagcgtttccaatacttcagattggggggtgatagggtaaccgaagtaaccgtccacgccgatacggatggcggcatgggctatggcctcgttacctttcataagaacaacttcttctgccataatttttcgattttgcttgttgggcatttttattcttcacttttcgctctgtacacggtcagacaaccgtccgggcacacaatggcgcacgaagagcatccgttacaggtatcttccactacctgttgtacgtaattatatcctttttgatttactttcggggtgagtgacaacacatgcagcgggcatgctaccacacataagttgcatcccttgcagcgttcggtatttacgataaccacacctttcatcttagccatagtatatatctcttattgattaaacatatctttattataaaagttaagtatatccatcaccatctttcgggcatcggctgccggactttccgggtctagggcaatcgcttcctgataattgttgagtgctccctgccagtcaccttttttccgataggcatttcccaaaagataatatgcttccgccgtgggcgaggaagccgtttgcaaccaatcattcaggcgagatatagcggtgtctacatgtccttcatttatcagttgtctgatgtgattcagttgttcattcatgggcttttatgtcatattgtaaccttacaaagatagtctttaatttggtacgagagtcatttttacggaataaatagtaaaaaataccgatttttcttgtttgtgcaattgtgcaacatgttgattattaaagagttttgtgatgttttattttgtttcaactgaaaaagatgtatatacaactaaatgatgtttctgaaaagggggattgtgtatgaatgataatttaatgcttgtcaaaaatttattgaaatgcaggaatctatttgattatgttattatttcttataactttgtagcaatttattcatgaaacaaacaactaaataattaacttatcagatagaattatgaacaagattcttcagaaggaacatttttccgaaaaggtcttcaaactggtgattgaggctcctttgattgcaaagtcgcgtaaggcgggacattttgtcattgtccgtgtaggcgagaagggggaacgcatgcctttgactattgcagcagccgatccggtgaagggaaccattactttggtggtgcaggaggtaggactttcgtctacccgtctgtgtgaactaaatgtgggtgattacattacagacgtggtaggtccgctgggaaaggctactcatattgaaaacttcgggacggtggtttgtgccggaggtggtgtaggtgtggccccgatgttgcctatcgtgcaggcattgaaggctgcgggaaaccgggtcattaccgtgctggccggacgtactaaggaactgattattcttgaaaaggaaatgcgtgagagctcggatgaagtgattatcatgacggacgacggttcttacggacagaaaggtctggttacggaaggagtagaagcagtcatcaagcgtgaaaaggtggacaagtgttttgccattggtccggccatcatgatgaagtttgtctgccttctgaccaagaaatatgatattccgactgatgtgtcgctgaacaccatcatggtggatggtacgggcatgtgtggtgcttgccgtatcaccgtaggcggaaagacgaagttcgtatgtgtggatggtccggaattcgacggtcatcaggtggactttgacgagatgctgaaacgtatgggggctttcaaggatattgagcgtgaagaaattcataaactggataccaaacctgcaacttgtgaagctgaacaggctgcttccggacgaaacgctgaatggcgtgaagcgttgcgcaagagcatgaagccgaaagaacgtgtggctattccgcgcgtgaagatgaacgagctggattcggaataccgttcacacagtcgcaaggaagaagtgaacttggggctgagcgaagagcaggcgctgacagaagccaagcgttgtctggactgtgccaatccttcttgtatggaaggttgtccggtaggtattgatattccgggctttgtcaagaacatcgaacgcggagaatttctggaagctgcacgtacgctgaaaaagaccagtgcacttccggctgtgtgcggacgtgtctgcccgcaggaaaagcagtgcgaatcgagatgtattcacctgaagatgggtcacgaagcggtggctatcggttacttggaacgttttgcggctgactatgaacgcgaaagcggacagatttcagtgcccgaaattgcagccaagaacggtatcaagattgcagtagtgggttcaggacctgccggattatcgtttgcaggcgatatggccaagatgggttacgatgtaactgtgttcgaggcactgcatgaaattggtggggtattgaaatacggtattccggaattccgtctgccgaacaagattgtggatgtggaaatcgaaaacttgtctaagatgggtgtgactttcgtgaaggactgcatcgtaggtaagaccatcagtgtggaagacctcgaaagcgaaggcttcaagggaatctttgttgcttcgggtgccggactgcctaacttcatgaacattccgggcgagaactccatcaacatcatgtcttcgaatgagtacctgacacgtgtgaacctgatggatgcagccagcgaagatgccgatactccggtgacattcggtaagcgagtggctgtaatcggtggtggaaatacagcaatggactctgtacgtaccgcacgccgtctgggagcagagaaagcgatgattatctaccgtcgttcggaagcagaaatgccggctcgtctggaagaagtgaaacatgccaaggaagaaggtgtggaattcctgacactgcacaatccgatagaatacattgccgatgagaagggacgtgtaaaacaggtggtattgcagaaaatggaactgggtgaacctgatgcttccggtcgtcgtagtccggttgccattccgggagctacagtaactctcgacattgacatggccattgtcagtgtaggtgtatcgcctaacccgattgtgccgaattctattccgggattggaattaggacgcaagggaactattgctgtcaacgatgacatgcagtcatccatcccgactatctatgccggtggtgacatcgtgcgtggaggagccactgtaatcttggcgatgggtgacggacgccgtgcggccgcagctatggaccgccagcttcgtcaggcataaaaacaagcttgaaaatcgggcataaaaaaacgctttgacgtttgtaatagaacgtcgaagcgtttcatttaaaacgcacttgcgttttaggtaaaacgtcaaagcgtttgaacaaaacgtccttgtgtttcggttgaagcgcaaggacgtttttctatgtggttactgacgcagctgagtgcgtgtgatttcgcctgtatacatggtgtatgacttgttgctatctgctttaatgttaagcgatttcaagtcttcagctgtcatcttctggttcattgacttcttacattcaataactgctgtcggttgggaagcaccttgtgcatagaatgaaatcttatattcactgcactgttctatcagggcgctaagcgcgatgcggtcttgtgcaatcagcaggtaagccacgttcttgttgaataatttgccaaaacctccccagttttcagccttgatttctatttcttcatcgttggcagtcagggtaatgcgtccgttctgcagctggctgttccagttgtccgagaattgtgcaacaggcacttctttcagctcgcctgtcagggtcatggctggagtcagaggagttgccggaactacagcaggagcagtttcgttagccagcaccttttgtcccagtgcatcggtagccgactggaagagttggtccttcaggtcgatggtttcacgacggaattttccgcagataggagccagtttggttttcttcttgttcagtgccatgtcatctgtaatccattcttcggcagtatatttttctccaccatcgcggttttcgtcataccagtagcggatgcgggtcatggtcatgcggcataccccatcggccacattgataagatactggtagtagatgcgggtgcggtccagtgacagggcggaagaagagaatacgatgtattcttcggcagaggcggcaatgtcgccctcttcttcgttggtgtagactacgcggctctgcagttttccgtcagatttgaaacggttgttggcccagtccagcatttgtttgtagagctgctctttcgagagcgaaggagccttgatttcatgattgaaggttacctttccatcctccattgtaatagctccagccagatatttcgggttagagttgtcttttttatccttggccattccgaacagcggcaggcaagccaataagatgaacaatagttttttcatgattcgtatcaaagttttttatagtatgaaatattatttcttaaagatagcatgtgtaaagataggtattttttttaactgcggtgtaggaataggatttcttattatttttttgtgaaacaattatacatttcagtaaaaacaacaaagcccgtttcccttttcaggaaaacaggctttgtacgtatttctatcaaatagaacctctccgaagcaggagcgggggattatcgaacgggaattttgtcgatgcgtgcctggtggcgtccaccttcaaaatcggtagtgaagaattccgtcataatcttgtcggccattgcttcatcaatgaaacgtcccggcattaccagtacgttggcattgttgtgctgacgggccagatgagcaatttccggaatccagcaaagtgcagcacggataccctggtgtttattcagggtgataccgattccttcaccgcttccgcagatggcaattcccggatagcattctccgttttctactgccaaagccagcgggtgagcaaagtcgggatagtcacaactgtcggttgtgtaagttccgaaatccttgtattcccatcctttggcttccagccattttttcacgtattgtttcaattcaaatccggcatggtcggatgcaagtcctattgttttcatcagagcatttcttttacttggttatatacattttcagcagtgaagcccagtttttcatccagcactttgtaaggagcagagaaaccgaatgattccaatccccaaatcttaccgttggtacctaccagacctaacaggttgactggcagaccagctgtcagaccaaataccttggcgccagccggaagaatgctttcctgatattccttgctctggctgcggaacaaaccttctgatggaactgatacgatgcgagtcttcacaccgtctttgtgaagcagttcagctccggctaccaatgtagaaacttcagaaccagaagctaccatgataacatccggattttcgtcagaaccagctacgatgtaagctcccttggcagcctgtgagtagtctgtacctgccggcaacatgttgatgttctggcgagacagaatcagagccgacggagtatcggtattttccatagccagtttccagcagacagtagtttcttctgcatctgccggacgaagtaccagcatagagttctttccgtggtggtttttcagtttttccatcaggcggatttgtgcttcctgttctaccggttcgtgagtaggaccgtcttcacctacacggaatgcatcgtgagtccagataaacttcactggcaactgcatgagggcagccatacgtacagccggtttcatgtagtctgagaatacgaagaatgtaccgcaggcagcgattacaccaccgtgcagtgccataccgatacagcagcaagccatagtcagttcggctactccggcctggaagaaggcaccgctgaagtcaccgttaacaaatgcgtgagtctttttcaagaaaccgtctgtcttgtcagagttagacaagtcggcagaagcacagatcatgttaggaacctgctgtgccaatgcgcccaatacagtagcagatgcgttacgagttgcatcgtttgctttctgctggatacctgcccagtctactttcggagctactccgctgaaccattctttcagctgagctgctttttccggattggctgcagcccatgcagcttcttcttcataacgtgcagctacgatagctttcagttcttcttcacgttttgcgtaaatttcttttacgtcgtcgaagataacgaacggattttcagggtcagcacccaagttgatcatagtgttcttgtaagcgtcgccacccagaggagcaccgtgagtcttacagttgtgttcgtatgaagagttatcgtccttgcgggcacccttacccatgatacatttaccgataatcagcgtcgggcgtttgctttctgcttttgcagcatccagagcagtacggatttgttcacagtcgttaccgttgatttcgatgacattccatccccatgcacggtatttcatggctgtatcttcagagataacatcctttgtttctgtagaaagctggatgtcatttgagtcatagaacataatcaggttgtccagacccaggtgtccggcaatacggcctgcgccctgagaaatttcttcctgaataccaccgtcagagatataagcgtagatagtttctttattgaaagtagggttacctgtacgagctgcaaggaatttggcagcgatggcagcacctacagcgaatacgtgtccctgtcccagtggaccagaagtgttttcaatgccgcgcattacgtctacttcaggatgtcccggagtaggagagccccactggcgtaattgttttaattcgtctaatgtaaatttaccgataagagccaactgtgagtacaacatcggtgacatgtggcccggatccaggaagaaacggtcacgaccttcccatttcgggttctgagggtcatactgcagatactctgcatacaagacattgatgaaatcggctccacccattgcacctccggggtgtccagactttgctttttcaaccattgaagcagccaaaatacgaatattatcagcagcgtggttcattacttgtttgctgttcatataactaaattttgatttgtatgctacataaaatgcgagtggcatacgtcacccgctttttgaaattatgagcaaaggtatgacatttatatgtaaattacaaagtggaaataacttatttatttcacatttttttacttcttgtattttactgcagcctcttctaccggcagacaagccttataattttcaatatatgcattgaatccggcaacgtcttctgcagtaggagatacttctacgcccgcatttccggcaaacactttttcgtcgaggaagtcagccagtgactgcttcttgtcattgttcaccagataagaacctaacagtgcaataccccatgcaccaccttctcctgcggtttccatgacagaaatcggagaattgatggccgcagcaagaactctctgacctacacccttagtacggaacagacctccgtgacctgtgatgcggtctactttaatcttttcttcgttgaagagaatgtcatttccaatcttcagtacgcctaccgatgcatacaagtgtgcacgcataaagttggccaggttgaatttatcgcttgccgtacgaacgaacaacgggcgtccttctgtcaaaccggttacaggttcgcctgagaagtagttgtacgaaatcagtccgccgcagtctgcatcacctgtcagtgcgtggttatacagtttgccgaagatttcgtccatatctaccggcatacccatcagttcctggtattccttgaacagatttacccatgcgttcaggtcggaagtacagttgttacagtgtaccatggctaccagacttccgtcaggagtagtcaccatgtcaatcatttcgtaaggttttgacaggtctttttccaaaacaatcatagagaaagaagaagtaccagccgatacattaccagtgcgctgttttacggcattggtagccaccatacctgttcctgcatcaccttccggcggacaaacaggtacacctgccttcagatggcctgatacgtcgagtttcttggcaccttcttcggtcaggcaaccggcattttctcctgccagcaatactttcggcagaatgtctgtcagtttccagctgtatccgtaaggagctactaacttgtcgaacttttcaatcatttcggcagagtagttctttgtttcaggatcgataggaagcatacctgaagcatcaccgatacccagaactttttcgccggtaatctgccagtgtacgtaacctgccagtgtagtgaagaaagtgatgtccttcacgtgttcttccttgttcaggatagcctgataaaggtgagagatactccatctcaatggaatgttgtagacaaagagttcagacaattctgcagctgctttacctgtattggtatttctccaggtacggaacggtacgaggatttcttctttatcgttgaaagccatgtaaccgtgcatcatggcactgataccgatggctgccaagttttctatttcgatgccgtactggctttttacgtttgcgcgaagatcagcatagcagtcctgtactccagcccagatagcttcaatgctgtaggtccagagtccgtcttctaactggttttcccaggtgtgacttccctgagcaataggtttattttcctggtcaatcaggacagctttgattcgggtagaaccgaactcaatacccaaaatggctttacctgcctcaatggttgactttgcatctttcatattaaaaatcgattagttaaagtgaaaaataaggcaatattaaaaaataaaagtgctgccagaaagaaatcttctgtccagcacttttaagatatacttgattaagtattagcaaagagctttgttcagcatgtagtatacttcgttcatgcgaagttctttcttgaatccgtcgatggtagtatccttgttgatatgtaccatttcgataccagcgatttcagcatagtcctcccagtattctgcagtcaggtcgtatgagaagcaagagtggtgagtaccaccagccaaaatccatgcacctgcaccgatttcgaagttaggcatcggtttccaaagtgcagaagcaaccggcaatttcggcagtggtttcggttcgatacattctacgtcgtttacaatcagacggaaacggttgcccatgtctactacagtagcagtacatcctgtacctaccttagaagtgaagacaagacgtgcagtctggctcttgcgtacaccgataccgaggaagtgtacttccagacgaggtttcttggcagcaatcatcggacaaacttccagcatgtgagcctgaaggatagagctgttttcaccgtcgaagttcagtgtgtagtcttctaggaaagaacatccgttaggcaatccctggttcattacccatacagtacgatacaaagcagctgatttccagtcaccttctgcaccgaaaccatatccttctgccatcaggcgctgtgaagccaatcccggaatctggtcgaagtagcttccgtcagtctgacccaggtcatcgaagttagttgtgaaaccttttgcacctttcgctttcaggatagcacgcagagccagttcagctttagcggcattccatactttctggtatgcttcagaagctttgtcttccaatgctgcatcgtggtcgtattcattgaagtaagtttttacaagagcttctacctcttcgtcttttacttctttgtgatagctcatcagttcgcttaccggacagtagtctacgtggtaacccatgcgctgttcagcttctactttatcaccgtctgtaacagctacgttgttcatctggtcgccgaaacgcagaatcagcatatcctgagagtctgcccatgcagcacatacgcgcatccatacagcaatcttagacaatgtgttttcatctttccaatagccaactactactttgcggcgtacgcgcatacgagcgcagatgtgaccaaattcacggtcgccgtgagcagactggttcaagttcatgaagtccatatccatggtgtcccaaggaatttccttgttgaactgagtgtgcaggtggagcaacggtttctttaactgctgcaagccgtgaatccacattttagcaggagagaaagtgtgcatccaagtgatgacaccgatacatttttcttcgttgttggctgctttgaacactgcttctacttctttagaagagttggcagttcctttatatactactttcacaggcaatttgccgctggcattcaaacctgctaccatttcgttactgtgtgcgtctactgcgataactgcatcgcctccgtaaaggagctgagctccggttacgaaccatacttcatattgatcaaatgcgttcatagtgattttatgtttttaattggttggatatttgtttttatgttattttttctgtccgtaataagcgttcggaccgtgcttgcggctgaagtgtttttctaccagcagcgggttcatggtcaggttcggattgacagcgtaagcaatgctggccattttggcaacctgctccatgactacggcattgtgaacagcatcgtgtgcatccttaccccatgagaaaggaccgtggttctttacgagtacacccggagtatgtaccggattcataccttcaaagcgtttcacaattacgtttcctgtttccatttcgtaggcgcccttcacttcttcttccgtcatgtcggcagtgcaggggatagcttcgtggaaatagtcggcgtgagtagttccgatgttcggaatatcgcagccagcctgtgcccatgcagtagcgtatgtagaatgtgtatgtaccacaccgccgatttcagggaaggctttgtacagtacaaggtgagtcggtgtgtcgcttgaaggacgcaagtttccttctaccacgtttccttccaggtcgactactaccatgtcttcggctttcatttcatcgtaagacactccactgggtttgataaccaccagtccgctttcacggtcgatggccgatacgtttccccacgtgaaaataaccagtccgtgtttcaccaaatccaggttggcatggaacactttttctttcagtgcttctaacatattcttaaagtttgaatttcggatctttctgataagccttgtcgttgaatttgtaaagagaggctcctcttcgtgatcctgttttatcaattttatctgttttctctataaatcccatttctgcaatacgcttgcggaaatttcgcttgtccatcggttcaccgtaaattgcttcgtagagactctggagctgtgtcagcgtgaacaactccggcaagaggttgaagccgataggggctcttgaagctttttgcttcataatggcacgagccttctcaaccatttcattgtggtcaaaaatcaggtcgggtaggttattaatgtttacccagtatgcgttgtgctgctgtaccagctcacggtcatattcattgatgttgattaaggcataataagccagtgagataactcgttcgcccggatctcggtctacagctccgaacgcaccaatctggtccatgtatacattttccagtccggtcagttcgctcaatacgcgtttggcagcatcatcggcactttcgttttcctggatgaagcctcccatcagcgaccattgtcccattgcaggctcgaaatttcttttgagtagcaatagattcagttcgcctttgtcgaatccgaagataatacagtcgattccgacataaaatttgggattatgattataatatgtggtcatgaagttcgtgacttttggttctttacaacttgatttcttaggtctctgttatttttctactgtaaacttgaagatacagtgactgtggtaagtctgtcccggagtcaggataacagaaggccattgtggtttgttagggctgtcaggatagtgctgtgtttccagacatacagatgcacgctgcgggtaaacaatacctttcttacccttcactgtaccatccaggaagtttccggtatacacctgaatacccggttcgtctgtatacacttccagactgataccggttgtcgggctggtcagtttagctgccacctgattgatgtcacctttggttttcagtacccagttatggtcaaatccgttaccgaatcttacttgttcgttagagaaatctgtcactccttcgctgatggctttcgctgtgttgaagtcaaacggagtatcttttactgccatcatttcacctgttgtcatgaaggtgctgtctaccggagtaatactgtcggaagctacgtagagcaggtgatctgtagctggtttagacgggtcgccattcaggttgaaataagaatggttggtcatgttaatgactgttgtcttgtcagtagtggcatcgtatttaatatcgatggcattgtcagcagtcaatgaataagtcacattggcagtcacatttcccgggaagttattgtctccatcaggagatttcatcgtcagtacgatggtgctgtcattagcctgattggcttcgtatacctgatactgccatccggtaggaccgccgtgcagacagtggccgaagttattggtcggaagctggatctcctgtccgtcgatagtgatttttcctttattgattcggttggcatagcggccgatagaagctccaaagtcacttggaatattctgatagtcagcaatgctgtcaaaacctaaaactacatccgtcatttttccgtttttatcgggaaccatgaccgatacgattcgtccgccgaaattggttacacaaacttccataccctggctgttcttcaaagtataaagtttgatgggtttggcattttcagctgaaacctcaaaattagcagggttcaagcctgataaagtcagctccggttgctgggcttgcttggaagcacaaccgctcaatactgcaaggatgatacttgcccctaagaaagatttattcatgcttttcatgtgaaattattgatgtttttatctatggtgtaaaagtaacacttaaaacgattgcttgttctttttttcagatgtttttcaacatagaatgtgtgtttttcagtagtttctataaaaaaggaagaggacatgcggtttttgatttgcatgtcctctttttatgagttggtttctatggattaccagaagtatgcgtagaacaaagcgcacagaacaaccactcccagtgtagcgattacatcccacatattccagctttcgcgaattgctttcttgtagtcgccggtgaaagtgatggctgcaatttgttcagatgtcggtttggcagtaaacatggatactacgtacatcatgataacgatgaataccagcaaccatacttcaaagataagccagttagtctgccagaaccaagaagtgtattcccagaacgctccgtccataacagctttaccagagtcggtaagtacgttggtcaacagacgcagcataccaataaggaagcctccgataagtccccattctccagctttcggtgtgatgcgcttagagaagatacccagggtaaatacggctaccatggcgggagcaatcagagactgaatatcttgaagataagaatacaggttacccatgttcatcatgataggcatccaagccaatcccaacagtacgacaactactgtagctatacggcctaccattacgtagtggctttcgctcatgcctttcttcataggtttgtagaagtcttctgtaaacaatgtcgcacagctgttaaagaatgcagccaaagaagccaccagggcgcagatgaaaccgatggttacgatacctttcacacctgcaggcaggatgttcttaaccatcatggcaaaagcaccatctgtgtcatgtgtgttggtgatgtccattacgatgttgctgccggttttctgtgagagtgcgaatgccaccatacccggaatcaggaacatgaaaacaggcaacagtttgaagtaaccggctgcgattgtaccgcggcgtgcgcgtgccataactttgcggttgtcttctcctttagtctgtccgagcacacgctgtacgatgtgctggtcagtacaccagtaccagaaaccgatgatagatgctccgaggaataccacataacccgggaattgcggatacatagggtctgcagggtcagtgtggaacatgtgagttgttccgaaaccgtcgtgtgcggcgttacaaacggccatcatttgtgaccatccttctgagatgctgccatcgcccagcatattcaagcctaagaacaaaactaagaatgaaccaatgataagaataggagtctggatggcagaaagtgtcattacacctttcatacctccgaagacagtgaagatagccgtgatgaagataaggccgattgctccccaccagaatggaagtccgagcaggtattcaaagaagataccgccagtgaatgcagttacagatacctttgtcaatacgtaggcaatcagtgtaatgatagataaccatgaaccagtacgttgtgtgtagcggaatttcaggaagtcaggcatagtgataatcttgcccattttgttgtttaataactgatagaaaggaacgaacaaccatcctaaaataagaatcatccatccttgcatttcccagtgtgccattcccacaccgtcttttgcacctgtacctgccaatcctacaaggtgttcagaaccgatgtttgctgcgaagatagcagcaccgataatgtaccaaggttccccttttccgaaaaggtagtcctgactgtcggcacctttcatcttttcctgatctttctttattgcacggtaaacagcccacacaatagcaatgactccgacggtgaggaccagccagtcgagccaaataaattcagttgaattccaattcataatagtattattttaattatttgtgtattgattttgcggttatcaaaacgtgtttttatactgttcgtttttcaaagtgtattagtaacactaattcgagtgcaatattacggataagtgtaaaattacactaataaaagtccatgttttagagcatgtttcgtccttttttttcgttctccttcgtttttaacatttctgcagatgatgaaagtaaaaaacttctgtcgacttttgagtatttttacgcgttcgttcgtattagttattgtgaaaataaaaaactagaagatatgaaaagagtgattctgtggctgtgcctgtctgtggttataggggcggtacaagcacaaaccgggcggctggacttgaaacttccgcaaggacatccccgctatctgaccacacaggaggggaagaaagaaactcaggagttgattaaaaaggctccttgggcaaaagatgtgtatgagcggcttcggcaacggacagataaatacgtagatcggggaacagactggctgtcctcccgtttgctgatgtactggaacacacatgccaccgatgtatatataaaaggtgagtactacgcccatgccggaggtgagaaggcaccggctcctacagtggtatttaccggagcacgcagccatgccaccaattacaaacgtcctcggctggaggacttggagccttatcaggaagatgccagaggaatgtacttggccaacagtaccctggagggtaatccttacgagtgggtgagcatcagcaaaaccggaagaatgattgaaagcatcaacaatgaaatcgtaggcatagcccgcgatgcggcattcctctggtggctgaccggcgagcagaagtatgccacggcagctgcttccgtctttgatgtgtacatgacaggtctgtactaccgcaatgtgcctgtcgacttgaattatggtcaccagcagacattggtagggatgacttcctttgaggtgattcatgaagatgtcattaattcgttggtaccgctttatgatttcctttatacgtacttgcagaaagaaaagtcggaaaagatgactatctatgccgatgcgttcaagaaatgtgccgataacatcatcgccaacggggtacctcacaacaactggaacctgctgcaggcgcatttcattatgaatattgccctgattttggaagatgatgcgaagtatgctgacggcaaaggacgccagtactatatcgattatctggtgaaccagtcgtccatccgtcagtggtcattgaaaaaactggccgattacggattcgatgcagccacgggtgtctgggcagaatgtccgggttacagcagtgtggtggtaggtgattatgccagctttgtcagcctgttcgatgagaatctgggtatggacctgaccaaggagattccggtacttccgaaagctgtagaagctatgccgcaataccttttcccgaaccgtatggtctgtgggtttggcgatacgcatccttccacactgcggacggatattttccgttatatgattcagaatgcccgtacccatggaaagtctgaagaagaacgaaagtttacggccatgctgaaactgttcgacccgtcttcttctcttccggtggcagaaagaggcaaggcaccggtagccattacatctttctttgtcgggaaaccgctcgtgttggatgaaaaagtgaaggctggccagattgacgactatgtaactcctaccttctatgctccgaatgtgagctggctggtacagcgtaacgggatgaattcccgtcacagtctgatggtgtcactgaacggaagtgaaggcaatcacatgcacgccaacggcatcagcatggaactgtatggcaagggctacgtgctcggtccggatgccggcatcggtaaaaccttgtatcaaggtctggattacctggagtactatagccagtttccttcgcataatacggtctgcgtagacggaatttcttcttatcctgtcatgaagagcaaccattccttcaagctgcgtgccctgtatcctgcgactggcgaacggattccttaccagccgatttcttatagtgaagtctacttccgcgaaccggaaacttttgccgaccagacccgtcttaacggaattgtcaatgtgggtgattctgcaggttattatatcgatatattccgtagccggaaagtagaaggcggcgacaagatgcatgactatttctatcacaacttaggacagcagatgacgctgacagcggccgacggcagtgaactcgaacttcagcctacgcaggaactggcttttgccggagcccatctgtatgcttactcctatatatataataagaagcgggcggtgacaagcaaagacgtgaaagccggatttaccatccagatgcccgacaaggacgatattacgatgaacctctggatgaaaggggaggaaggacgcgaaatcttttcagccctgagccctatgacggaaggattgagccgcatcaagaatatgccgtattccattaaggaccagcctacgctcactttcgtggcacgccagaaaggagaagcctggaaccgtccgtttgtggccgtgtatgaaccttctaccctaaaagaaccttcctgcattgcgtcggtcgattatccgcaggtaaagagtgaacagcagggcagtcatgtcggcatacgcgtggcactgaccaatggaaatgtcgactggattctgtcgtcggatgagaatgcacaccactgcaagttggaaaagctgcaggcccgtgcaggctatgcgctgtgccgtcagtcggaaaagggagaaactcttcaggctttcctgggcaacggtacacagctggaagcggatggagtgagcatccggacagatgcacctgctgatgtcttgctgctgaagcaggatggaaaatggatgtatacggctacggctccttgtagggtagttgtaggaaagaaaaaatatacgctttcagtttcaaaagagttacgtcttttgaagtaaaatgaaattttaagtttacttttgtagtaatatattgatttataattgtatacgctcttccagtacttcctttgcagtacttcagtactgcaaaggaagtactgtggtactgtcgaggaagtattgtagtacttctttgacagtacttatcagggtatgaggttttgtattgatgtctgggaagacagtgcggttttttgtcggatatttttatgaaatataggcagattctatgtatttttgctcatgaaacctatggcagttttgtaaatgaagaaatgtttgatatatatttatctccttttgttaaccagtctgtgctgtttgcaagcgggagctgtttcctccgaaatccgtagtttgtccgtatccgacggactccctgatttgatcattaatacgatatacaaagattcaaaaggctatgtctggatgggaacgaatacctcagtagagcgttttgatggcatacgcctggagcattacatggtagagggcagcaatgagaacctgaagcgggtgtttgcactggttgagatgccgggcaatgaactatgggttggtacgggcatgggacttttccgcttggccgatgatgccgagaagctcgagcggctggctcctgaaatgattacaagcggggtacatgcattctgtaagttgggggatgtgctctatgtaggaacggaaaaaggattgtatgtatacaagggaggagtttttgaacatgtgctggtagacaagaatatcttttcgcgtgcgaattttgtaacgggaatggtggaaggagaaaacggtatattgtggctctctacgatgggaggcttgaaatctcttcgtttgtccgaccagtccatcacttctttctcagacaaattggcgaagaacgggcagaacctttctttctataacatcacacgtatcggttcaaagatttttatgggtacaatgactagcgggctggtgctttttgatacagccagcaagcacttttcacgctatctggatgtaggttgcggagtcatctctgccttgtcaggcgatgggaaagacctgctctatgtaggaacggacggaaacggtgtacattttatttcagtgagtcgccagcgtgttatccgtacctttctacacgaccgtgaggcagatagccagattcgttccaattctgtgtactctgtattggtcgaccgtgacggcttgttatggattggcttttaccagttgggtgtagactacaccttgttccaaagcgacttgttttccacctatcaatatgagaacttgtttgattccagagacatggctgtccgtaccattgcctttcatggaagtcagaaactgataggttcgcgcgacggctttgtgtttatcgatgaggccgatggcagattccagatattcaaggcgccccgtctgcgggcttccatcattgtgtcaagctgttatttcgacgggaaatattatatcggaacctatggaggaggtatgtatgtgcttgatggcgccacattggaactgcgggattttgagattgcttccgaacccttccagcatggacatatttttgtgcttcgtcctgacgaccggggaaatctgtggattggtacttctgccggattgtattgttaccggaacgggaaaatcgtgcgtcacttcaagagcgacagttccaaactgcccgaaggcaacgtttatgagatttattttgattcatcccataaaggatggatttgtacggaaagcggtatctgcatctgggacccttcgtccgaaagcttgaagaacgatgtgttcccggaaggatttgtgcataaagaaaaaatccgtatgatttatgaaacttccgaccatcagctctatttcttgccagataaaggagaattgtttgtatccgaccttaccatgagtcattttagccggctcactcccggaacgctgttggacggaaagtcgttgatggctgtggtggaagattcggaaggctggctgtgggtggcgaccaataagggtatgtaccgtttcgacaagaaaaccaaggtcgtacctttcaattttgccgatggtattcccagcctgatattcatcaactgcattccgataaaagatgaagacggaaacttctggtttggtaactccagaggactggtgcgcctgaatgggaaagacatggatatgctccccagccgttatattatttcgttgtcggatgtgctggtcaatggtaagagcatgcagcatcagctttcgggagaagaaggtcattatgcgctcacgctggagaattcgcagaagagtgtaatcattcagttctctgcacttacgtacagcgacccgaacagcctgatgtatgagtataagttaggagaggagggagaatggatttccttgatgggaaaatcggaagtatcgctgtatgatttgccttcgggagtcacttcttttgttatccgtcagattgggtatcccgattcggccatgaccttggatatttgcattcccgaccgttcctggtataagtggatatattctcttgtggcattgttgttggcggctgcaggtgtgtatgtgttccgtcgtagcctgttgcgtgtggtatgggcggttttacgtaagctgaacggctttaacgacgcggaaataccgatggctgtggaggaagataagaaaaaagaagaggcagaagaagtcgtaacaccggaaatagaaccagtgacagaggaagaaactgtggcggaacctatagaaccgaagccggagaaaaagactgcttcctctgctgatgacaaatacaggacgaacaaggtcagcccggaagagtgcaagcggctttaccgtctgctggaacaggagatgaagcgtaacaaaccttatcgcaatccgaatctcaaagtggcagatcttgctgtgtcgataggcactacctcccattcactttcctatctcttcaaccagtatttggaaaagaattattatgactatatcaacgaatatcgtgtagaagaattcaagtcgcttatcctgaaagatgagtatgcaaaatatactctgacggccatggcagaactttgtggtttcagttcgcgtgcctcgttcttccgcacatttaagaaactggcaggaataactccgaacgaatacatcaaacaagtctcaggtgagcatcgtccggtagattaacggactttttagtgtcaaaatagggaaaaacatcctgtacgtaagtgtcaaataataatttgagactctcgtgcgggatgttttatttcgttgttaatcaattttttgtgtagaaactagtcttgcatgataaggtgagatttattccatgttacatttgttttagttttttgggattgtagatacatttgcagtgtcaaaaaaccaaaacaagctaatttatgaaagacctgacgaacacatccaatgagctagtagcacagatttttgcggactaccatcagtcggtcttcttttatatctataagaaaatagggaaaaaagaagatgcggaagatttggttcaggacgcatatcttcgccttttggaataccgtgctatgcttcgtcccgataccgtaaaatatttcttgtttacgattgtacgtaatctggtgtctgactatctccgccatttttataaaaaacaggaagtggccgcttatctggaggaaaattatcagtcacagcgtgctggagatgcagatgcctgtgtcattgtacgtgacttgcagaagcaagaactgatgagagtgaattgtctgccttgtcagcgtcgtaaaatctatattatgaatcgttttgaggggaaaacatcggcagatattgcggccgaattgaatctttctgttcgtacggtagagaaccatctgttcatcagccgcaaggaagtacgcaactatatgaaacaatgtatataaaataatgataagaagtaaaaacgttaatttaaagtttaatcttatgaagaatggttttctgaaaaattcatcgcagagagtccttttttcagccatgatggtttcggctttagtagccggcaatgtggctccgatgcatgcggaggtgacttctgtacaatcggttttgcaatcggtaagtgtgaaaggacaagtgctggatgcggagggtatccccgttattggtgcaagtgttcttgaaaaaggaactacaaatggagtgatcacagacattgacggaaattattcgttgaatgtgtcttctaagaatgcagtagtggtgatttcttatattggctataaaacggtagaattgccagcttctaatcctaatttgtcgaaagtcattcttaaggaagatacagaggttttggatgaagtagtggttgtaggctatggagctcaaaagaaacagactttgacaggatctgtaacagttgtggatgagaaaatgttccaaaacaaaggaacggtgagtaaccctctttcagctatgcagggacaggtaccaggactacgtattactcgttcttctgctgctcctggtgaggaaggatggggaatatctatacgtggtgcagtatctaagaattctgtagacccgttgctgattattgatggtgtgcctgcaagcagtgtaagtgaaatgtcccagttaagtgcagatgatattgaatccattaacttcttaaaggatgcttctgcagccatttatggagctaaggcagctggaggtgtaattctggtaacaacgaaacgtccggatgcaggtaaagcaaaaatagaatatagcggttcgtttactcgtaaaatcgtgggattgcaacctcgtttgatgagccttgatgaatgggctgatggggtaattcaggcacgtactaatgatggttatggagaggatgatcaatggatacgttgtgctaagttggcaaagtctttaaagggaagctggataaacttgaatgggggagatggttcggttcctaatccaattcctaatgcttttattggtgtagccgattttgtgtttcacgatatgaactggacagatgtgttatggggaaatgcaaattctacacaacacaatttgagtctttcaggaggaactgataaatctagttaccgtctttcattgggttatctgaatgatcaaggtactttgcaatggggtaataattcaaatgaacgttataatgtgcgtttatctaatagttttaaaatttctaatcgtgttagcttggattctaatatggccgctagccgtcagcatcaggtagctcccacacagattagtgctgtcttaggtgtttctattcctcagccaggtttaccgatatcgactatagatggtaaaccttatgcatggggtggaattcatactcctaactggcaggtagaacttggtggcgataatagactgacggttactagtatgagcgtaaatgaggtcttaaaaataaacatattggaggggcttgattttcaaggaactgtaggatatagcacaaatacggcaatgcgtgatgagcaatatttgtctattgactggtatcagtatgatggtacgttaatcagaaatgaaaactctccttatcctgcacaggaaaaatcttcttacatgaagagcgcatcccgcacagataattgtacggcttctgctttccttacttataagaagttgttgaacgaggttcatgatttggctgtgatgggaggtgtacagtatgattatgcagcatatgattacagcgctactaaagtcatggatgtagagtctgccattgaatcattaaatggtaaaggacaggtttatattgataaagttgataagtgggaagaggctatattgtcttattttggacgtttcaactataattataagtcgaagtatatggcagagttgaatgcccgttatgacggttcctctaaattcttgccagaaaaccgttggaatttcttctggggagcatctgctggatggcgaatcagtgaggaaagctttatggaaggtattcatgactacgtgagcgaattgaaattacgcgcttcatacggagaggtaggtaatcaaagtggtatcggacgctatgatggtatccagttgtataattataagtcaaatagtggtgctttactgggaacatcaaaaggaacttacgtggaatcagcggggttggtaagtaaagtacgtacttgggaacgtatttataattacaatttaggtttagactttggtttcataggaaatcgacttaccggaacctttgaattatttatgaaaaaaaataacaacatgttgatttcccgtttatatccaggtgtgttaggtggtacagcaccaagtaccaataccggaaagtttatggccaaaggatatgatggaagtttgacctggcgtgataagataggtgaggtaaattaccatttaggtggaacattaacttatatgacgaatgaattgattgatggaggagaagtggtggtagaggctggatacaatgcagcattgaatggctatccgttaaactctatatttggttatcgttatatggggaaaattcagacagatgagcagctgatgaagtatacacagaaatatacaggaaacaactccgtaaatatgcctgctaaccttcgtttaggagatcatatgtatgaagatgtcaataaagatggtaaacttactcaggatgacttagtctttttaggtactgatgatcccaaactgtctttctcttttaacttcggtttcgaatggaggggatttgattttaatgcagtatttcaaggagttggagatcgtaccatctatcgcgaaattgatgcatggaaagtaccttttaaagctatttggttgaatacatctaatcaaagtgtgggcaatgtttggagccctgaaactcccaataactattatccgagctactcaaacaataatgatattaacaactacaattacatggcttctacatggtctgtagaaaatggtgcttatcttcgtttgaaggatattgtattaggatataccttccctaagaatttgataagtaaaacaggtttcttgagcaatctacgtgtatatgttgcgggagcagatttgtgggaaaaatcatatataaacgatggctgggaccctgaggctacacgcaaagtggaaaataaacagcgctatccatttaatcgtacaattacttttggtatcaatgctactttctaaaaataaagaaatgatgaaaaagataacatatattttgggattattttctatgctaacgtttcagtcatgtcttgacatggagccgaaaactcagttggcagatacaaattactggcagactccagaccattttaaattgtttgctactcagttctatggctggactgtcgattttaaacaattggatgatagtcctcatagtgatgttcgttctgatttgcggacaggaatcacattggatgtctacagtaatggaacgaatagtattccgtcgtcggataaaacttacaccaataattacaatcgtatccgtcaggtgaacacattattgcagcaggctgaaggttatgctgctccggcagatatcgaaacatcagtgggtgaggcccatttcttcagagcctattgttattttgatttgttgcaggtatatggagatgtcattattactcgtactccattggatattgattcacctgaaatgcaaatggcccgtaactctcgcgatgaggtggttgattttattctggaagatttggaagaagcaatcagacttcttcctgaagcaaatgagattagcagtaaagatgaaggtcgtttgtctagtcaggctgcgagtgcttttctttctcgtgtcgctctttatgaaggtacttggcaaaagtttcgtaatggtggacagaacaatgatcgttcaagcgcattattggatatagctgcaacgtctgctcatgatgtaatagaaagtggtttctttgaactgtttgctccagaggaattaggtactgaagcttacaaatatctttttatccttgaaaatgataaatcgaatcctgctggtattactaaaagtgggaataaggaatacatctttactagacgtcatgatcctacattggcttctattggttttaatatcacacaaggacgattgggtaatgctgtatacgtgacacgtaaaatggcaaatatgtatttgcaaagtaatggcttacccattaaccctcagacatgggattatagtaaagtggattccgagttcaaggaccgagataacagaatgagcaatacgcttatgataccagggcatacttattggggaaccggaggaggacgtattgactggacaggaagtgcggaagagatagcaaatgcttctcataagaattatatgccttctaccggtacgggatattttccacacaaatggtgttgcgaacgtgatggggtacctacagggatggaagcgtatgactatccaattatccgttatgctgaggtcctgttaaattatgctgaagctgtatttgaacgcgatgataaaatttctgatgaagatttagctatcagtttgaatttgactcgtaagcgtgttaatcctaatatgcctgatttgaccaatgcttttgtttctgccaataatttggatatgcgtactgagatacgtcgtgaacgtactgttgaattttatgatgagaatttccgtattgatgatttaaaacgatggaaaacagcagaagaggaaatgccgatgaatcttacaggagttaaatggagaggtactgagtatgaaacaaaatggtcggacgcttcttctaaaaccatggacgcagaaggttgtattatttacgaacagggtcgtgtttgggaggagaaacattatttgtatcctctgcctatagaccagctgaaattaaatccgaatttgaaacaaaatccaggttgggagtaatagttttatttgtattagcaatctaataatattatatcaatcatgacatacaaaaatatattatataaaggttgtgcggctgtttgtttaatagggacaatggcatctatggtttcgtgcaacgatgaaatggtctcacccgaaatgaatgaaaaggtacttatttctgatattaatttagatgtaacacctgtattaccgttgttggtaggaagtgatactatattgaattacagcgtattgccagaaaatgcttcagataagggagtaatttggaaatcaggaagtcctgaaatcgctagtgtagatgaagagggacggataaaggctgtacatgcaggaacagcaattatctcagtaatgcctgctgtaggttttgcggttacttctactgttgaaatcaaggtggtagatgagattatctttatagaagatatcaatcttgatatgacggaaaatgaactggaagtttatgaaactgcttcattgcagttgcgatggcaaacaattccttcagatcctacttatcctacgttgaaatgggaaagtttgactcccgagattgcaactgtgaccgaggatggggttgtgaaaggcgtgaaagctgggactgcacgtgttaaggcaacagctacagatggaaagcattttactaaagagtttacaattactgtgaagcccatcatctttatagaaactctttcttttgttaaagaatcagataagttggcattaggtgaagtttatgtacctcaactcaatgtaaaaccgggcaatgcgacactttcggcgttgaaatgggaaagcagtaaaccggaagtagttgaggttgatgaaaacggacactttattgctaagaaatatggaaccgctgtggttactgctacggcagactatggtgatggtaatcctatttctgcttctatgaatgtaatagtagctgagggtaaaatgaatgattcattcgagtttatgaactcatgggagaactttaacggacaatgtctggaattcaactggttggaagatcagggtattttaagtcttttcccaggtgctgacaaaaattataaagctatccgaatcaaacgaactggagggtttgaatttaatgtggctaattatccgattttggcatttaaagtgagattccccaaagatgtatttgaagtatctgaaaagatggagtggtatcttgatatgtggggtggtttatcatctggaggtaaatatggtgccgatacgaataagggaaacaaagccatggaagtattggattgtggtgattacaaagttttctatgctgattttactaaaaagaaagtgaatacggaaatgatgccgacaaaattgcagaaggtagataatgtcgtatttgaaatttggaaaatttggtatgaggctgatgaaacgggcacgatagatgtggactggattaaaacattcgagtcggaagaagctttaaagagtttaataaatgaagaaaagaaataagggacgataaatacaatggaaattgaaagagacgaaatctgtagtctatattgggcgaataatgtttttataggttcgtctctttcattctttccttatccctaatacctaacaataaaacagaaaaatatgaagttaaatagaatattctttccattagttgccgtaggtttaatggcaatgagctgttcagctgagtttgagcatggagtaaatgatatagatagctggcctttgtctggtgcaaattatgaaccgtctctggaacatccaggtatacttcatacacagaaagacattgatcatattcgccagatggtaaaggaaaaacaggaacctgcttatagtgtttttcaagcattggaaaaagagcctttggcacaatcttcttatacgataaaagggccttatgaagttattgcacgtgatggaaattatggatataccaagcgaaatgctgaacaggattttgatgctgtatatttaaattcagtaatgtggatgattacacaggatgaaaattatgcgaagaaatcattggaactgatgttggcatatgcagaggttttgaaagacattgatggaaatgataccgcattaatggctggtcttgaaggaatcaaaattgtctatgcattagaaatgttaagccatacgtatgataaaatcagtgagactgatattcagaaagtaaacgatatgcttcgtaatgtctttcttccggtgtgggaggagttttataataccgatccttacacgaatggaaactggggcttgcatgtgacaaaatcttatatggctgctgctattttgtgggatgatgtagatatgtataaaaaatgtgtgaatttttatttgtatgggaatgataatggtactatttcacattatattgatggggatactggacagtgccaagagtctggacgtgatcaacagcatactgtactaggacttggggccgtatctgctatctgtgaattagcttggaaacaaggaaatgacctttattctgcatatgagaaccgtgccttattaggttatgaatatacggtaaaatataatttagggtatgatgtgccttttgaaacttggacggatgtcacaggcaaatattgtaaatgggacgttatttccaaagagaccaaagataaaaatggaggagtggatacagagcggggtaattgttggcagcctgtattttatatggtatacaatcattatgtacaacgtaagaaattaagtatgccctacacagaatcattactggaaacgtatacggaagataagtatgacgggggacatccaagctacggtccgttgctgtttaatgatttgaaataatgtctcaatatttatatttataattggtgaaagcagccggccatttgtgtcggctgtttttgaaatcaaaccatagttcatgaaaaagaaaacaacaatattaggtctcctgctctgtctggcaagtctgacatgggcacagcagaacgagtgggagaaccctacgcgatacgagtggaacaaagagaagccgcacgtagactttgcgttgtatgagaatgcggaggacgcgcgtacggaggatcacagccgttcgccgtggattcattcactgaacggtacctggaagttccgttatgcttcttcgatagaagagagtgtgaaagatttttatcgtaccgacctttcggaggaaggctggcaggagattgccgtaccgtccaactgggagctgaagggtttcggcgaaccgattatccgcaacatccagtatgtcttctcaccgaatcctccttttattgatgtggagaatccggtgggtacctaccgcacatggttcacggtgcccgcgggatgggacgaacgtgaggtgatgctgcactttggctccatcagcggctatgcccgtgtgtttgtcaatgggaagcaggtgggcatgaccaaggcttccaagtcgcctgcggagttcaatgtgacttctttcctgaaagaagggaagaacctgctggcggtgcaggtgtaccgctggcacgacggcagttacatggaagaccaggacttctggcgcttgtctggtattgagcgcgatgtgtaccttcaggcgtatccgaagctgactatctgggacttcttcctcagagcgggactggacgataattataagcacggggtgttccgtggaacggttgacctgcgtgagttcagtggcaaccggatgaagcagggaatggtgaagctggaactgctggacaagaacggcaagaaggtgtgggcgcagagcagacgcttcgaccgggagaaacaggaggaaacgctttcattctccggaacggtcagtcgggtaaaccaatggaatgccgagcacccttatctgtatgactgtgtgctgacactggccgatgcgtcgggaaaaccgcagtcggtcacagcctgcaaggtgggtttccgccggattgaaatcaagaactcgaagctgctggtgaacggggtaccggtgtatatcaaaggcgtgaaccgtcacgagcacaatgacagcctggggcatgtgcagagtcgggacatcatgatgaccgacctgaaactgatgaagcaactgaacatgaatgcggtgcgtacgtgccactatcccaaccatccgctgttctataagttgtgcgacaaatatggattctatgtggtggatgaggcgaacattgagactcacggaatgggttccgtgccttacttcaaggatacgattccacatccggcttaccgtccggaatggtatgcggcacatgtggaccgcattacgcgcctggtagagagagacaagaaccatgcgtgcgtcatcggctggtcattgggtaatgagtgcggcaacggaaaagtgttccacgatgagtacaagcgcctgaaggcgtacgaccccgaccgcttcgtgcagtttgagcaggcatgggaagactggaatacggacgtggtatgtcccatgtatcccagctttggccggatgaaggaataccgcaattccggcaagacgcgtccctacatcatgtgtgagtatgcgcatgcgcagggaaacagcaacggaaatatcaaagacctgtgggaggtgatttacgacagcccgaacatgcaggggggatttatctgggacttcatggaccagggattcaagacgctggctgaggatggccgtacatactggacctacaacggaaagatgggcagtcaccgctggctggaagataagaaaacggaactgaatacaggcacggacggattgatttcggccaacggagtgcctaaaccgcaggcttacgaggtgaagaaggtgtatcagtacatccatttcaaagcagaagacttgtcggatggaaagatttcggtgcgcaacttatatgactttaccgacctttctgcgtatgacttccgctggcaactcgtcaagaacggggtactggccgactccggacgttttgaggtgcgcctgaaaccgcatgcctccaaagaggtgaagctgtcgcttccggaaattcttgcggatgaaaatgagtattatctgaacttgtatgcctatacgcgtgaggctacggaactggttcccgcaggctttgaggtggctcgtgagcagttgaagattggaacgggggatttctttgccgtgcagccgaaagcagagggacagctgactgccgaagtgaagggcaacgtgctgtcgttccagtcgggccgggtgtcgggcaagattgatctgaagaaaggagtgcttttccagtatgcgctggatggcaagtctccgctgtcgcagtatccggaaccggcgttctggcgtgtgccgaccgacaatgacttcggtaacaagatgccgttgctttgcggtgtgtggcgtacggcgcatgtaaatcgttcggtacgcaaggtgtcagtgggcgagcaggatgccaatggaatccgggtaacggtagactggatgctggaggatgtgcaggtaccctatacgatggaataccagatttgtcccgacggttcggtggtcgtaacaggaagcattgacttgacgagacggaagcttccggaacttcctcgtttcggtatgcgcatggaactgaagaaggactatgaacggctggtgtactacggtcgcggaccggaagaaaactataccgaccgttgcagctctaccttcgtaggacgttatgaagatacggtcaacaatcagttctatccgtatatccgtccgcaggaaacgggtaataagaccgatgtgcgctgggtctcactgctcgatgcccagggattcggactgaaggtgacgggcttgcagccgctggcatttactgccctgcactttacaccggaagaccttgatccgggactgacccgcaagctgcagcatacggtggacgtgattccgcaaaagaatgtgtgcctgcatgtggacctgaaacagcgcgggctgggaggcgataacagctggggcatgtatccgcacaatgaataccgcctgctggacaagaagtacagctatagctataaacttcagttggtagacggagaataagggcaatacaaatactgagaatataatattaaggtgaagaccggaaacagaatctataaaaggatgctgttttccggtcttttttgtttcttacctaaaaaatgcattctttttttaggtaaatcattttctccatacgtaactatttacaaaaacgtaaatttggatatgaaaataaagaacttgattttccttgtcggaatggcgggcttatgtgcttgcgtgaaagggactcatacacagatggcgtatgactttgctcctttggactctatcatttccggctggatggacaaaggatattatccgggcggggcagtctgtgtgatgaaagacgattccgttcttttccgaaaagactatggcggttttacggacagcacgcaggtgtatgtggcttcggccggaaagtgggtagcagcggcagtggtggcagccgtggtcgatacgacggctttggactgggatgacccggtagagaaatggctgcctgagtttcggggagatgcaaaggggagcattccgttgcgaaggctgctttcgcatacgtcgggcatccggccgtatcttcctgaaccccgggttgacaattacaatcacttggattcggctgtggcggagattctgccgctggatacagtctttacaccgggcacacgctttgagtacggcggattggccatgcaggtggccgggcgaatggcagaagtggcagccggaaaagagtttgagaccttgttccagcagctgattgcggctccgttgggtatgcggcattcacactttaccccagtcaacaccgacgggggacatgcaccaatgctgggtggcggactctgcacgacgctggccgactacatgcgtttcttggaaatgatttcgcacgagggagtatatgagggcaaacgtatcttgaaggcggaaacggtgcgtgagatgcaggccgaccaggtaggaagcgcacaggtgatgcccggagaatatgtggaacgggctcttggaaagcatcacacgggagtttacgggttaggagagtggcgtgaattactggatgaacagaccggagaggcgtatcagattagttctcccggatgggcaggagcttatccctggataaacaaacgcgagggagtgtgcggcttttttatcgcccatgtgcagggaggctccagcaaggaagatggcttctcgtcattttacggcagtccggtcctgtcgcgtacggtatcagaaattgtaggaacgaataataaatgaaagaaagatgaaaagaggagtgtgtatattatgtatggtaatggtctggctgcagacggtttgtgccggagagtggcagtgggtggttgcattgaaaggttttgtatcggacgaaacgaaaaaggaaccggaagctttcttgtgggttccggcacattgcgagcgcctgtcggccgtgatgtggagccagcagaacatgacggaggaaacattgtttgagatgccgtctttccgtgactcgctggccgagatgggagtgggactgatttggattgctcccggaatagaccagcagtgggatgtgcgcaaaggtacacagaaagtgtttgaccagatggtgaacgacctggcggaagtgagcggctacacggagttgcgtgaggtacctctcattcctttcggacattcggccatggccactttcccgtggaattttgccgcttggaatccggaacggacactggcggtggtgtctttccatggggatgcgccgcgcaccaatctgtgcggttacggacgtgaaaacctggagtggggacggacgcggaacattgacggcattcctggcctgatgattgaaggcgagtatgagtggtgggaagcccgggtaaatccggcattggcttttcggatgatgtatccggagagctgcatctcgtttctttgtgatacgggcaggggacatttcgatgtgtcggagcagacagctcattacatttcccgttttatccggaaagcactggagcaacgcttacctgccgatggcgggaagacgctgaagaaagtgaatccggctacgggctggctggtacagcgctggtcgcccgacgaacgtacaaggcgggctactcctgcaccggtagcgcgctacaagggagatgtgcacgatgccttctggtatttcgaccgggagatggcagagcttaccgaacagcgctataaggaacataaactgaaaaagatgcagtatttaggtatttgccagcagggcaagcgggtggattataatccgaaactgcatgcaggggtgttgctgaaattcttgcccgaagaagatgggctgacgtttcatctgaatgcctgctttacggattctcttcgtcggaatagggtagagggacatgccgcaggagacattcgtctggaaaaaatttgtggaccggtggagcaggtggatgataccacgtttacggtccgtttttaccgaatggggatgtacaatccgcgccgcacgtcggacatctggctactggccagtcatccgggtgacaagcactacaagggagccgtgcagcaggtgaatctgcgtattccttatcggttgacggaagggaaacgccagcacattcttttccagggactggaagacgtgaaggcaggaagtgcaccgttactcttgaaggcggtttccgactgtggtttgcccgtatattactacgtaaaggaaggtccggctcgcatcacggcgaacaatacgctggagtttaccccgattccgccacggagccgtttcccggttaaagtgacggttgtggcctggcagtatggattgaagggaaaggtacagacggccgaaccggtggagcgcagcttctatatctataaataataccttcttgtaaaccgacatataaccaatagccctgacatacttcccgtgtggtgaagcatgtcagggctattggtttgtaaaaactttcagtccttcttattttttcagcatctggaacagcttgtccagtttcggcgacatgataatctctgtgcggcggttcttggcgcgaccttcggctgtttcgttatcggccaccggcatgtattctccgcgtccgctgggttgtatctgcaacgggttgaccttgtatttttcaatcaggatacgtgctacggaggtagcgcggataacgctcaggtcccagttatccttgaactgtgcggtatgaatcggcttgttgtccgtatgtccttcaatgcatacatcaatttcggtctgcttgttcaatacctcagctaattttcccaaagcctcttctccacgtttatccagtttggcacttccggactgaaacaacagcttgtcggacatggccacatagaccttgccgttctgctcgcgtacggtcagctcgtcactgctgaagccgagcaaggcatctttcacactgttgagcaggctctgtaccgtggcattctgctggtcaatcatgccttgcagttcctgaatggtcttttcacgttcatccagttctttcagcttttcaccgagcagagcgttcagcttctcctgttcgttcatgttgcttgacaatagctgctggtaatggcggatggagtttccctgccggttggtatcttgctgcaggcggtcaatttgtccgcgcattttgtctatttcattgtggcattcgttcagttgcccttgcagcttgtctcctctggacaatgcttctatccgtccgttttctgcaaggaggaattttttcttggtgacgcacgaggtactgctcattatcagtgccccgcccagtatgattaaacctattttcttcataatctgcaaatttttttgcaaagatacggttgtttgcgtgaatcgtatgtggataaggtatttttttgtctttttatacatgaaaaacgtttacagggtatgtgaactttttcaggaaatcaacttgagttatttcttaaaaatatagttaaatttacctcgacacgtacgtgacgaggtcttgacacgttcgtgctgatgtctcgacacgtacgtgcggagaggttgacacattcgtgtcgaggtatttttgtaagttcgtttgcagtttggggattaaggggttgggaaagtgtggaggtatgtttagatggtaaggtctggaggctacgaatattttaaatttaacattggcttttcttatgcttaatcattaaatttgtaattattgcatgctaatcaatcttttagagaatatggatagagatagcttcatattataaggtaaatttaaggtaactgatgaataaaagaaaagaagaataaagaacatggcaaagcagttacagatttactgaaacaggaagaagaaagcatgacagagttgttgaatcggtttaggaaattgggttatggaattgaatgataaaatagtaatttatcgtaccgctgatggacaaacatccattgacgttaaattagaagacgagactgtatggccttcagctaaccagatggccaatctatttgatagggatgaaaagactataagaaaacatatcaataatgtcttttccgaaggtgaactggaaaaagagaacaacacgcattttttgcgtgttgatggagtgaaacaacctgttgccttttattctttggatgtcatcatttccgtgggttatcgtgtaaaaagccaacgaggtattcagtttcgtatatgggccaataaggtgctgaaagaatatctggtgaaaggctatgtcgtcaataaggttttgaccgaacagcgttatactgaattgaagcaattggtaacggtcttgggccgtacagtcaagacacaggaagcactgacttcggaagatgcgctcaatctggtggaagtggtttccgattacgcttatgctctcgatacgttagacagatacgattatcagcagctggcggtagagcagaccactaacgacgtaaagtttcatgctacctacgagggagccatgcaggccatagaagaactgaaggagaaattcggtggaagccagtggtttgcccatgagaaggatgattcctttaaaagttccatcgggcaaatataccagacttttggcgggcaagatctttacccttctgtggaggaaaaagcggctatgctgctttatctcgtcacgaaaaatcattcgtttagtgatggcaacaaacgtattgctgccaccctttttctgtggtttatggccggtaacggtattctctacaatccggatgggagtaagcgcattgccgataacacccttgtggctcttacgctgatgatagctgagagccgtaccgaggaaaaagatatcatggtgaaagtagtggtaaacctgattaataagaataactacgaatgagggtaattataggtggctgggtgattaataatgaataaaacagaaagctgcctgtatccatcttattcaattttaccgtaactttgccgcgcattttgaagaaggtaaaaaagatggatcacagtgtgactaaaaaacgtgcccaaagcaatgagatagatatgctgaacgggccgttgttcaagaaaattttgctgtttgcccttccgctggcagccagcagtttattacaagagctttttaattcggtggacgtggcagtagtgggccacttcgtaggaagcagggccctggcagccgtgggaagtaatgcgccggtcatcgggttattgataaacctgtttatgggtgtttccatgggagcctgtgccattatctcgaaccacatcgggcagcaggacgacaggagcatacgcaatgccatcagtacggtgcagttggtggcgcttctcagcggattctttttgctggtattggggcaggtagctgcccggccgattctgacatggatgggtactccgccggatgtattggatgaggcggtgacttacctgcgtatttatttcctggggatgccttttatcatggcatttaatttcggtgccgccattttgcgaagcatgggcgatacacggcgtccgttgtatattctggtcatggccggtgtggtcaataccttgctgaacctgctgttcgtgataggcttcggcatgggagtggcaggagtagctgttgctacgggcatagccaatgcggtcagtgctactttaatcattcgtttgctgcgtaaggagaaagaacctttccggttgcatttcgacaagatgaagattcacggggtggagttgagccgtatgctgcgcatcggagtgccggcaggagtgcagggcatgattttctccatttcgaatgtggtggtgcagtcgtctatcaacagctacggagccgatgcgattgccggttcgtcggctgcgctcaactttgagtattattgctatttcattattcagggattcaacggggctgccatcagcttcattgcccagaactatggggccggaagaatggaccgggtgcatcgggtgttctggatttgcatgggttcaagtctggctttctgtgcagccttcaactggctttttgcctggcaggatgatttcttcctgggcttcttttcggatgtgccgatggtgcatcatttcggggctatccgcatgcatattgtgctggcctgtcagtttattgccagcagttatgagattgccggttcgtcgttgcgcggtatggggaaatcgctgactccggccgtgctcacggtgtttggaacctgcctgttgcgtattgtctgggtgtatggggtatcgccggtgtggagaggatacgatgtgctgatgatggtgtacccggtgtcgtgggtggttaccggattgctggtgcttacggcttactggttgtttatccggaaaaagagattggctttgaactaaaaagaaagaggttgtctcaaattttgagacaacctctttgctatactaaaggatgagtgtgtttcttattcccactcgatggtggctggtggttttgacgagatatcatagcaaacgcggttcacgccttttactttgttgataatgtcgttcgaaaccttggccatgaattcgtagggcaggtgagcccagtcggctgtcatggcgtcggtacttgttaccgcacgcagtgctacggcacgttcgtaggtacgttcgtcgcccataactcctacgctctgtaccggcaacaggattacgccggcctgccatacctgatggtacaaggaggtttcgttgccgttttcatcttttaccttccagtcgcgcaagccctggataaagatgtcgtcagcatcctgcaggatacgtactttttcacgagtgatgtcgcccaagatacgtacagccaagcccggacccgggaacggatgacgggtaatcaggtgttctggcatacccagttcgcgacctacacggcgtacttcatctttgaacaacagacgcaaaggttcgcaaagtttcaggttcatcttttccggcagaccacctacgttatggtgactcttgataacggtaccggtgatagacaatgactcgatgcagtcaggatagatagtaccctgtgccagccatttcacatcctgaatcttatgtgcttcttcatcgaatacgtcgataaatcctttaccgataatcttacgtttgcgttcgggttcggttacacctgccagttctgagaagaacttttcgctggcgtctacgccaatcacgttcagaccaaggcattcatagtcgtgcaatacgttcttgaattcgttcttgcgaagcattccgtggtctacgaagatacaggtcaggttctttccgatggctttgttcagcaatacggctgctactgatgagtcaacgccaccgctcagtcctaacactaccttgtcgtcgccaagctgttgcttcagttcggctactgtggtttcaatgaaagaagcggcactccagtcctgctttccgccacagatgtctactacaaagttcttcagcagcaaagttccgtcttcgctgtggaacacttccggatggaactgtacgccccagagcttttcgttctttgcctggtaagcggcgatggctactttgtcggtagaagcgatgatttcaaagttgtcggggatggtagtgatggtgtcaccgtggctcatccatacctgagaatgttcgcggatgcctttcagcagcgggttctggtggtcgaaagtagccaggtgtgcacgtccgtattcgcgggtgttggccggctctacctttcctccgttggtgtacgacatgaactgtgcaccatagcagatacccaggataggatattttccgcggatgttggttaaatcaactttgaaagccttctcatcatacactgagaaaggacttcccgacaagattacgccgataaccgacgggtcatcgtgtggaaacttgttgtaaggaacaatttcgcaatacatgttcagctcgcgcacacggcggccgataagctgcgtggtttgtgaaccgaagtcaagaataataattttttcctgcatattgtgtgtgatgtaaaatgtaatctatgcgtgcaaaggtacgcatatttttcctaaatccgatgtggcctttgattttatttgaggccgaaacctgtcatttggagctttgaaagccttatggtatgctttttttaagttttatatgtaaataagtaaggaataaatttgtacttttgtcgccgtatgagcagaattttggcaatagattatggcagaaaacgcaccggaattgcagtgaccgatccgatgcagattatagcgaacggactgactaccgtgccgacacatgagctgatggattttttactgaagtatgtggcgcaggaaaaggtggagcgcatcgtggtggggcatcccaagcagatgaacaatgaggactccgaaaacatgaagtatatcaaaccgtttgtggcgcagctgaagaagaagttgccggacatgccggtggaactggtggacgaacggtttacttctgtgctggcacatcaggcgatgcttgacggcggactgaagaagaaggcacgtcaggacaaggcgctggtggacgaaatcagtgccacgattattctgcaatcttatttggaatcgagaagaatgtaacttaataaatttttgaataatatgattttacctatttatgtatacgggcagcctgtattgcgtcaggaggctcaagatattacgccagattatccgggcttgaaagagctgattataaatatgtttgaaacgatggaccgtgccgacggggtgggactggctgctcctcagatcgggcttcctatccgtgtggtagtggtgaatctggacgtgctgtcggatgatatgccggagttcaaggatttcaagcgtacgtatatcaatccgcatattctggaaacaggcggtgagatggtttcaatggaagaaggctgtctgagcttgccgggtatccacgaaagtgtgaagcgtccggacaagattcacgtgacatacctggatgaaaacatgcagccgcacgatgagtgggtggaaggctatctggcccgtgtgatgcagcatgaattcgaccacctggatggtaccatgtttatcgatcatttgtcggctttgcgcaaacagatgattcgtggcaagctgaacggtatggtgaatggtaaagctcgttgctcttataaagtgaaaacagtgaaatgatcaaaagaatcctatacatattatatataggtatgtttttcccggtggttgccctgtcgcagattaatacggacagggttatgaccatcgggaaaaatgcactttattttgaggattatgtcctctctatccagtatttcaatcaggtaatcggggcgaaaccgtatctggctgaaccgtatttttaccgtggactggccaagatgaacctggatgattatcagggggcggaggccgactgttcgcaggcgctggaacgcaatccttttgtggtgaatgcgtatcagattcgcggtatctcacgtatccgccagcagaattatcagggggctattcaggattaccgcaaggccttgaagatggatccggagaatatcagtctgtggcataacctggctttgtgccggatgcacgaggaggaatatgcgcaggcacgtgcggatttggatacgctgattcgtatctctccgcgttatacggatgcgtacctgatgcgtacggaggtgtcgctgaagcagaaggatacgctgcaggctatgaacgatgcggacaaggccatcgagatggaccgctataatccggatacatggtcgtcgcggggtatgctgttcttgcaacgcggaaaatataaggatgcagaaacggacttgacggaggcgattcgtctgtcggtgcgtaatgcgggcgtgtatatcaaccgtgcgttggcaagataccatcagaataacctgagaggggcgatgtcggattatgacctggcactggatgtagaccggaacaattttatcggacactataaccgtggcttgctgcgtgcgcaggtgggggatgacaaccgcgcgattgaggattttgactttgtgctcaagatggagccggacaacttgatggcccgtttcaaccggggcttgttgcgcgaccgcacgggtgattatcccggagctatcgaggactattcggcggtgctggaagaatatcccaacttcttggccggatatcagtatcgtgcgcaggccagaagaaaggtgggtgacctgaaaggagcggatgccgatgagtttaaggtactgaaagcgcagattgaagcgcagaacggtacgaagaagcagacggcttcgaacgacaagacgcgtaagaaatcggataagaacgtggaaaactaccgtaagattgtggtggccgataatgattcggaagacgatcgttacaagacggattaccgtggaagggtacaggacaagaatgtgacgattttgccgcaaccgatgtttgccctgaattactacgagcgtccggaagaggtgaagcgtcaggtcaattattataagggtatcgacgatttgaatgcacgcagggtgcttccgcatcgcctgctgattacgaacaacgaggcttcgttgtcggaagagcaggtgaagcagcatttcgcttctattgatgaacagacggctgccattgtgaaggagtctggtaatgtgctgcattattatgcccgggcacttgacttctatctggtgcaggactttgacaatgcgttgaaggatttggatgaggctatccgctgtgactctacgttcttcccggcttatttcagtcgtgcgctgatttattacaagcagttggaataccgtaagcgcgaccggaagtttgaagtggaaacggtagaggaacagaacctgcaggtgcgttcgtatgactataataaggtgcgcgaagatttggaccgtgtgattgaactggctcctgactttgtgtatgcatattataaccggggtaatatcctggcggtgatgaaagactatcgggctgcactggtagattacaacaaggccattgaactggatccccgttttgcggatgcctattacaatcgcggattgacgaatatctttcttgggaacaatcgccagggtattcaggatttgagtaaggcgggtgaactgggaatattctcggcctacaatattatcaaacgatttacgacaatagaggagaaataattggatgcaatatttttctttaactaaaaagtttatatttttgcgtctcaataatagattaatacaaaaagactatggttaagataacttttcctgacggctccgttcgcgagtataacgaaggagttactggtctgcagattgcagaaagcatcagttcccgtttggcacaggatgtattggcttgtggggtgaacggtgaaactgtggatttgaatcgtcctatcaacgaagatgcaaacttcgttctttataaatgggaagacgaacaaggaaagcatgccttctggcatacaagtgcacacttgctggctgaggcattgcaggaattgtatccgggcattcagttcggtatcggtccggctatcgaaaacggattctattatgacgtagatccgggtgaggctgtgattaaggaaggtgacctgcctgccattgaaaagaaaatggctgaactggctgccaagaaggaagagctggttcgccagagtatttcaaaggaagatgccttgaaaatgttcggtgacagaggtgagacttacaagtgtgagctgatttctgaattggaagatggtcacatcagtacatatactcagggtgcgtttaccgacctttgccgtggtccgcacttgttgtctactgctcctattaaggctatcaagctgctgtcagtagctggtgcttactggagaggtcaggaagaccgcaagcagatgacacgtatctatggtatcactttcccgaaaaagaagatgctggatgaatatctggtaatgctggaagaagccaagaaacgtgaccaccgtaagattggtaaggaaatggatttgttcatgttctcggatacagtcggtaagggacttccgatgtggttgccgaaaggcactgctttgcgtatccgtctgcaggacttcctccgtcgtatccaggcacgttatgactatcaggaagtaatgtgtccgcctatcggtaacaaactgttgtatgtgacttcaggtcactacgcaaaatatggtaaagacgcattccagcctatccatactccggaagaaggcgaagaatacttcttgaaaccgatgaactgtccgcatcactgtatgatttacaagaactctccgcgttcttatcgtgacctgccattgcgtatcgctgaattcggtacggtatgtcgttacgaacagagtggtgagttgcacggattgactcgtgtacgtagctttacacaggatgatgcgcacatcttctgccgtcctgaccaggtgaaagatgagttcctccgcgtgatggacatcatctctatcgtgttcacttctatgggtctggaaaactttgaagcacagatttctttgcgtgacaaggaaaaccgtgaaaaatacatcggtagcgatgaaaactgggaaaaggcagaacaggctatcgtggaagcttgtgaagaaaagggtttgaaggcgaaagtggaatacggtgaagctgcattctacggtccgaaactggacttcatggtgaaggatgctatcggtcgtcgctggcagctgggtaccattcaggtggactacaacttgccggaacgcttccagttggaatacatgggctcagataaccagaaacatcgtccggtaatgattcaccgtgctccgtttggttcaatggaacgtttcgtggctgtgctgattgaacacactgctggtaagttcccgttgtggctgactccggatcaggtggctatcctgcctatctctgagaaattcaatgactatgccgataaggtacgcatggaattgaaaaagtatgacgtacgtgcattggtggatgaccgtaacgaaaagattggccgtaagattcgcgacaacgaaatgaaacgcatcccttacatgctgattgtgggcgaaaaagaagccgaaaatggtgaagttgccgtacgtaagcagggtgaaggagacaaaggaaccatgaaaatcgaagaatttgcaaaaaatattgcagaagaagttcataatatgataaataaatggtaaatttgcagccgtttgctgacagaatcaaaattctgcggcaaacggactttaaaataaataatttataaattcaaaaaacaaacaggaagacactatttttaatgaaaaatgacacgttaaaagggcaacaccgaatcaacgaacagattcgcgccaaagaagtacgtattgtgggagatgatattgaatcggcggtatatccgattgcgcaggctttgaaacttgcggaagaacacgaagccgacttggtcgaaatttcacctaacgcagttcctccagtttgtcgaattatagattattctaaattcctctatcagctgaaaaaacgcgcaaaggaacagaaagctaaacaggtgaaggtaaacgtgaaggaaatccgttttggacctcagactgacgaacacgattacaacttcaaactgaaacatgccatcggtttcttgcaggatggagataaggtaaaagcatacgtgttctttaaaggacgttccattttgttcaaggaacagggagaagtgctcttgctccgttttgctaacgacttggaagactatgcaaaggtagagcagatgccgttgctcgaaggaaagagaatgactatatcattgtctccgaaaaagccgggagctccgaaaaaggctgcaaaactagaacctgcgaaggtggttgaaaccaaagaataaagaaaagaaagtgcgtaacgtgccggtatagtgcgttaccatgtgaataataataattaaaattttaacaagatgccaaagatcaagactaactccggtgctaaaaaaagattcgctcttaccggaacaggtaaaatcaaaagaaagcacgcttttcacagtcacattttgactaagaagactaaaaagcagaaaagaaacctttgccacatgggcttagttgacaatgctaacttagctcaggtaaaagaacttctttgcatgaagtaatcttaacaaaagcgtaaaaacgtatcattttaaattattaaccgaatgcattagcctcaagtccgattgagaatatatcggcgctatcattcaaaaaagaattaaaactatgccaagatcagtaaatcacgttgcttctagagcaagaagaaagaaaattttaggtttaaccagaggttattttggtgcaagaaagaacgtttggaccgttgctaagaatacttgggaaaaaggtctgacttatgcataccgtgaccgtaagaacaaaaaacgtaacttccgcgcattgtggatccagcgtatcaacgcagctgctcgtctggaaggtatgtcttactctaagttgatgggtgcattgcacaaagcaggtattgaaatcaaccgtaaggtgttggctgacttagctatgaaccaccctgaagcattcaaggctgtggttgctaaagctaaagctgcttaatctcaccggagacggagacaatgtataaaggatgcccctaaaatggcatcctttttttgtgcattatttttgtatattcaaatatttgtcgtatatttgtatcgtaaaaattgaagccgtacttgcagaatcgggaaactcatcaaatctaaagaaataccgagacaagcttctacttccaatggcgggccacgccttcgggtagcatttatgccggtggattacaaaggaggggagcactcaaaacctgtcattcggagtttcgtcacgcctcgggtacggcttctcctttttcataaaagcgaagaatcttgggtttagcgagtcaaggttcttcgtttttttatgagtttacttttggaacgttgtttacttagataatataagaactatgaggaagcacattttaatgtcgttgtgtgccggctctcttttgttgggggcttgtgctggaaaaggtgagcagaaaatgagtgtgtcacaagaaccggatactttgttgatgctggtgggcagttatgcaagtgcagatcaagaagggataaagacgtatcgcttcaatcaggagacgggagaggctgtgctggccagtacgttgtctgggattgagaatccgtcgtttttagtgccgacggaagacggtacgcatgtgtatgccgtgggagagacggaaaaagggtttacggctaatgcgctggcattggatacgttgacttcggggctggcgttgctgaacagccagtctacgggtggagcttcaccgtgttatattacggtgagtccggatggcaagtttgtgttgaccgccaattacatgggagcgaatattacggttttccctcgtctggcggatggaaagttaggagaggggcatgtcatttccttccagggaaaaggagccgataaggaacggcaggagcagcctcacttgcactgtgtgtatttcactcccgacgggaagttgcttttggcaaacgatttgggactggaccgtattcacgcttttccggtaaaacaaactccaggaacgaaaggaacggatttattggatgaagcggctgcttttgatattgagttggctccaggttcaggtccgcgtcatacttgttttgacaagcagggaaaacatgcgtatctgttgacggaactgtctggcgaagtagtggtgtggacgtatgatggaaaggccctgatacagcagcaagtcatcaaggcagatacggtgggcgcgaaaggtagtgcggatattcatctgtcgcccgatggaaaattcctgtatgcttccaaccgtctgcaagcagatggcgtggctattttcaaggtttctccttccgatggtacactgaccaaggtgggctatcagttgacgggcattcatccgcgtaatttcacgattacaccgaacggcaagtttctgctggtagcttgccgggataccaatgagattcaggtgtttgcgcgtgatgcagaaaccggtcttttgcaggatactggcaagactatccataccgataaaccggtttgtctgcaatgggttatgaaataagtaattaaaccatatacttatacggcggggaaagagaggcggaaacggcttcctttccccgctgtgctttgtacgctgatttgtcccccgtgcaggctgataatctgtttacagagggtaaggccgataccggaaccgttattcttagtggtgaagaaaggcacgaagatacgttccgtcacttccggcagcataccttctccgttatcgctgatttcgaaaatgagttcctgggcatgagtttctacctggatgcgaatgtccggatgggagcgatgggcacatgcttcacgggcattcttcagcaggtttataaatagctgctccatctgtgtgcggtcagcataccaggtgagctgggaagacgggcatttatactgcacttccagttccgggtaaagtcgttgcaggtcggaaagaaactgttccagtgggatttccgtcttcatcggggccgagatacgggtcagtttccggtaattttctacaaactccagcaagccttttccccggcggtagatgacctgtagcccttgctgtatgtaggtatgcgtacgtgcatcatcaggatgctcctggcttcgttcattcaatgtatctgccagagagataattggggtgatggaattcatgatttcatgcgtcagtacccgtatcagcttttgccaagcttccatttctttgtactccaatgcgccgtggatgtttttcaagctaatcagccggcaggttcgtccttgcagctggatgtgagtgaccgacagggagaggtcgaaagtggcgtttcctttttgcaggtgagccacctgctggttttcctgaatggccgtgctgatttcttcgggcagatgggcgcagtgtcccaatagttcgcgggctgccttgttcatccattccatccggttgcttcggtcggtgacgaggacggccgtatctaccttgttcagcagcatttcatagtattggtgctttacctcctcatctactatacgggtgcgcaggttcttcagagcctgtgaaagttcttctgctaacttctgcatctgcgggtcggcaaaaggtgcgcaaacccgctgtcccaggtcattctgtttcatgcattccacgagccggtacatggtttcagtctgccggatttgtatgcggtacaggctgtaacagatgccaatgagcaacagtccgcagatgatggtacagaaccacagtccatgcagcatggctaaaacacctgcgataatcagacctgtcagtcctaaaatgtgcagtatcaggtagtatccatacgttttcataagccccatttttccagtttccgataaagtgcaaaacgtgtaattcctaatagttcggcggccttgctcatgtttcctgtgctcactttcaaggcccgttcgatagcattcttttccagtttctctaagttgagttcttccgtcagtgcaggctggtgcgcggcggcattcccttgtggaaacaagaaatcatccggtttcaggagtccgttttcgctcagaatgacggcacgttccacggtgtgctgtaactcacgcacattacccggccattcgtatttcagcagcttgtttttggcttcacgcgtcagtcccttgatttccttgcggtatttccggttgtactgattcagaaaatgtgtagctaacagcagaatatcttctccacgttcccgtaaaggagggatgtgaagttccacagtattgatgcggtacaacaaatcctgacggaattttccttctgccaccaactgatgcaggttggcattggtggcacaaatcagccgtacatcgatgtgtatcggattgactgcccccagtcgggtgatgcactgcttttcgatggccgtcagcaacttggcctgcatgggcagggacaagttgccgatttcatccagaaacaacgtaccccctgaagctgtttccattctgccgggtttcgctttccgggcatccgtaaaggcccccttttcgtacccgaagagctcactttcgaacaactgctccggaatacttcccaagtcgatgggaataaagacctgttcccggcggggagagaagaaacgcagcatgcgtgcagccaggtccttcccggtaccattttctcccagtatgagcaagttggcatccgtatcagaaagcttgtagatggtttcttttaccttctgcatggcgggggagttgccaatcagttccggaatgcgatcgtctcccttcagggcctgtacctcattctgcaaccgtcctacttcctggcgtgaacggctgagtttgacggcagccgacaatgtagccaacagcttttccttctcccatggtttggagataaaatcagtagccccggctttaatggcctgcaccgcttttcccgtatccgcgtaggccgtcatgaataccactaccgcttgcgggtcgatacggaggatctgcttcaggtagtcaaacccttcctgcccgctgatggcatcccgctggaaattcatgtcgagcagaatcacatcgggatggaaggtagtcatgaaatgttcaatccgtgtaggctgtgtagttactcgaatctgctccatataaggctctaacagcaggttcaaggcgaagagcacgtcttcgttatcgtcaatgatgagtatttttcctttttcttccatacaatatcaaggtgtctttcgcaaagataatgcttttttgcatgtgctgtatgtgcattttcgcacgctttttgtgcggatgcgcacacggtgtgaatttgctcgattcctctatcttctacataatcagtgcgttatctgaatggcacagtttttggatataaaaaagcagataactatgcgtatgaagatgggaaacaagatactgtggcttatgagttgcctgcttttttgcgggcaagttgtgtggggagagaagctgacgctgcaagaggctattcagttggcgcaggccagctctccagaggcagaagctgctcggcatacctaccgggcagcttactggagttaccgttcgtttcgggcagactacctgcctgaggtaagtttgtctgcatcgccttatctgaaccggcagattaataaggtaacccagcctgacggtacggaactgtttctccgccagaaccagctggctaccgacctgacgctttccgtcagccaaaacgtctggttcacgggaggtaacttgttcatgcagaccgccgcccagcgtatggatgaactgggcgagaaaagcacggcttataacacccagcctttcacggtaggttaccgtcagtcgctttttggctataactccttgaagtggaaccgccgcattgagcccgtccgttttcaggaggctaagaaaacatatagtgagacgctggagctgattgcttcgaaaacatgcgagttgttttttgcactggcatctgcccagtccgacttggagattgcccgagccaactatgcttccgctgataccttgtatcgctatgcccgcggacggtatcgcatcggcagcattacggagaacgagatgttgcagctggaagtgaacaaactgaccgaggaaaccaacctgatgaaagcccgtatcagtgtggaagacgcgatgcttaccttctgttctttcttaggtatccgggaggaagaagagatagaggtgattccgcatgacagtgtgccggattttgaagtgcctttggacaaggcactggaacaggcccattttcacagtccggaaattgagacctaccggcggatgcagttggagagtcgtagccagttggcctctgctcgtgccagtcggggactaaaagcggatttgtaccttcagttcggactttcgcagaccgctgcccgtcttcgggattcctatcgtgacccgctcgaccagcaatacgtgagcctgtccgtagtgattccgatactggactgggggagaggcaagggaaaagtgcgtgtggccaaatcgaacatcgagctggtcaatacccaggtggaacagggcatgaatgattttgaactgaacgtgcggcagatggtacggcagtttaatcttcaggcacggcaggtggaagtagcctcccgtaccgacgaaacagcccgccgacggtatgaagtggcactccgcctttacctgatgggcaaatcctcggtgctcgatttgaatgcggccactacggagaaagatacctcccgacgcaattatatcgaggctctgaaaacctactggatgctgtattacggactccgcagcctgacgcaatatgatttttaccggaactgtccgctgactgaaactttacctgaaatataacacaaaccgattatggatatacaattgaaaaagaaaccctggtacgttcgctatcgcctttatctggcgggcggcgtactcttgctggccggactgatttatgtgattatactggcttccggcccccagcgtttacgcattgatgcggactctgtgcaattggccgaggtgaagcaggcccctttccgtgaatacgtggacgtggaaggagtggtgcatcccattctgactttgatggtcaatgcccgcgagtcgggtaatgtagcccgcatcgtagccgaggagggaagccttttacagcagggagataccatcttgctgctgaccaatccggacctgttgcgcgagatagacgaccagcgggatgaatgggagaagcaacgcatctcttatcaggagaaggcccttgagatggaacagaaaagtctgaccctgaaacaacagacactggaggctgcttacgagttgaacaagatacggaaaagctttgccctggagcaggaagaataccgtatgggcatccgcagcaaggcgcagctggaagtgtcggaagatgagtaccgctataaaacggcttctacccagctgaagatgcagagcctgcagagcgattcggccatgacggtcattcgcagagagctgttgcgaaacgaccgggaacgggaacagaagaagctggagcgttctttgcagcgtatggaagagctggtggtacgtgcaccgaccgatgggcagctcagttttgtgaaggtcacattaggccagcaggtggcagccggagagaatctggcggaagtgaaagtgatgtcgcagttcaaggtacatgcttccctgagcgaatactacgtagaccgggtgacggtaggcctgccggcatccgtaacttatcagggaaaacgctatgccttgaaagtcagcaaggtggtgccggaggtgaaagaccgcacctttgatgtggacttagtctttacgggagaaatgcctgaaaacgtccgtctgggaaaaagcttccgggtacagattgagttagggcaaccggaacaagccttggtaattccgcgcggtaatttctattcgcagaccggcggacagtggatttacaaactcaatgccgacaagacccgggcgagaagggttccggtgataatcgggcgtcagaaccccctgcaatacgaaataaccgaaggtttgcagcccggcgattgggtgattaccacaggatataataactttggcgacgcggaagagctggtgtttaagtgaatgaaccagatgctttcacctgcttccagtacttccccgaaagtaccggagtactgcctaagaagtactgtagtactttcagggaagtactgagaacgcttaaagtgaagaattacagaaagttgggaaattaatagtgaatattggaaacagtgactctccggagtatcctatagtcgaatataattattgatttatgaaagggaaaataaaacacataactattgctttgggaatctgtcttttattggcaatgattgtactggggcttaaaaaccgtaatactatatatacctggtttttgggcgatgtccagacgctttatatgcaggcagatagtttgtacagacagaaaagatacgaggaggctgcgactctgtactcaaaactggcgaaaatagacacagcaaaacgttgccagtttattttgggcgatatatattatcagggtaagacaggggtaaggaattacaaaaaggccatgaagttattcctggaattggcagataacggcaatgcagattctcagaacaatctgggctatatgtatgcttatggcataggaacagacatcgactattctaaagctaaaaaatatctcagtctggctgctttgcaaggacactctcaagcgcaagtgggattgggcagtctttacaggcatggctggggagtcaccaagagctattcggaagcattcaagctatataaaaaggctgcggcacatgataatactgatgctatgaataatttaggatatatgtacacattcggttacggaacttcaaccagtgcgggcgatgctatatactggtttgaaaaatctgcttcaagagacaatgtctccgccttgtttaatctggctgtgtttcatatagaaggacatggataccccaaagatttatcgaaaggagctgaacttctttcaagagcggctgaactgaattctcccgcagcgcagttcaatttgggattgatgtactatttcggaaaaggtgttgagaaggattatgccaaggcaaaacatttgttccaacaggcgtccgcccaaggacataaccatgcgttggaatttctcatgaaggtggagaataaggagaaggtttctgaaaccgattcaatctttgattggaaattgaaggcgatataatgtggtattaaaaatacctgattttataattgttgacacgaatgagtgaaaagatatgattgtacattacctgaaaatagcctggcgtaacttgctgaaataccgtatgcagagtgtggtcagtattttaggactggccgtgggcttggcatgttttgccctttctgccttctggatacattatgagatgacgtacgatacgtttcatcgtgatgcagaccgtttgtatctggttggagtgaatgacgatagtttcggcgggtcttccgcgagcttcacgccttatgccttgggacgttacctaaaggaacattattcggaaattgaagattactgtttgtttgaggcagaaactttttttgtgctgaaagacaaccggatgctggagttgcccatgcttctgcccgatactactgctttgcgtatgctggacatccgtgctttggagggggatgaaagttttcttcgtgccggtaccacagataaccgtattgctattacggagaaggccgcaaaacagctgtttggcactacggatgtgattggccagaccgtgaccaatgccaactggaacaaggaatataccattggtgctgtggtgagcgactggggagtgcacaccaatttcccgtacgccttcctgggtaacggaagcggacggacaggctgggacgattacacctaccggacacttgtcaaagtgaagccaggtacggatgtctcccgattactggagaagatgaatgcccacttccccgaagaactgaccaaaagcaggtatcaggagaacacgggactgacacgtttctacctggagccgctgacgggtcttcgtgccacggaaggtttcatccttaaaaacaaccagacggtgcagttccgttatatcacctggtttgctgctgtaggtggacttattatcgtttgtgcttttatcaattacctgacaatctacatcgaccgtttccgtacgcgcagaagagaaatggtgttgcggcaggtttgtggggcaggactgcgttcgttggttactttgctttgtactgattttctgctgacagtcctggcggccttggtcgtagggatggtattggtagagttgctgatgccgattttcctccgatattctctgattcaggatgccgacttttcgaactaccgttcaatcttgttctacattctgtcggtatcggtagtcatgatggctatcgtagtgctgtgggtatggctgtttcaaaagcggtcattgcatggaaatatgcatacgggcaatgcgctttcgggtatcgcttggcggaagggaagtgtcattcttcagctgacagtctgtatggctttcatcttctgtacggtggctatgcagctgcaactgcaccatttgcggaatgtggatacaggcatggactatcgcggacgggcagccgtcagcatttggatgaatgtggacatgaacgtatgggccgagaaaatcaaggccttgccgatggtgacggaagtgatacgtccggcctattggccgctgctgggcgaaggggcttattcgtcgtacctgatagatggatatacaggcatggaaggccggctggagcaacccctgacctttgacgaagtgctggcgggtgaagagttcttccgcttttacgacatgcagctgctgtctggtgaatgggtatcggccaagtcggaatactgtcaggtgaacatcatggagagcacagcccgtcgtatgggctggaatcccgaagaagctgtaggcaagcaactgtttttcgtcaaccgcgaacaggagcctatgaccgttatcggcgtagtgaaagactgtgcctacaagtcgcctaccgctgagcttcctaacactgtatttgtcaacactgaccagatgaagtggatgcacgcccgttgcttcgtactcttcaaataccgtccgggaacgtgggacgaatgtcgccgtcgcattgaagagatgcagcgtgccgaactgcccgaccgcaagctctttctctatagtgaagaagagcgttacaacgattatctgaagtcggaagatgccttgtcgtcattgcttgggttctcatcgctggtgtgtatcttcatatcgatattcggtatctactcgctggtgacactggcatgcgagcggcgccgtaaggagatagctatccgcaaggtaaacggagccacggtgaggcatatccttacgctgtttttcagagaatatgctttgctgctggtcgtttcttcgctggttgccttcccagctgcctggtgggtgatgagacgttggatagagcattataaccgtcaggtggaaatcggattccttccatttctgctgatttttgtcggcgttgccctttgcgtggcggcttgtatcgggcatcgcatttggaaaacggcaaatgagaatccggcagaggtgataaagagtgaatgatataaaagaatgatatagaaataagaaaagaaaacaatatgaacacactacgctatgcattacgtttcctgcttcgtgcacggacgtacacactgattaatctgttggggctggcattcagtctggcttgctgcatcattttgctccgatacatccatcgggaattgacggtcgatacccattgtgtagaccgggaaaaagtgtatgccgtgcaagtgagtgtgtctggaggtgcatattggggctcttatgcagcttatcggaatgacagtgtactgattgctcctgaactgatagaaacgaaatgtagttttgttccgttggagaatgattttctggtcagtgagggacaccgttaccgttgcgatgcccttgctacggacagtacgttttttcaactgttctcttatccgctgatacagggagaaaagaacctgaccgatccttcttcagtagtactgacccaatcgtatgcacgggaggtttttggttcggacaaccctgtcggaaagacaatcacttattccaacggacaagaatatgtggtgaaaggcgtgattgggcttcctaccaacaaaacctggctgaatttcgatttgcttctggcaaatacctcttccaataggtgggagaagatgccgctggatttgtaccgttttgtacctggagcagatatgaataagcttaatcaagtagggaaacatccacgcagcctgaatccgcactatccgtcggatacacgggtgtacacctttcgtttcgtacctttgaaagaatgttacttttccaagttggaaataagggaacaatcacctatttatgtatggggagattggggacagttgcagatatttatgggtatctgtgcgttgctgctggttaccggattgctgaacttcatcaacctttacatgatttttatgctcaaacgcacgcacgaatacggtatacgccgggtgtttggagcaggaagaggagctgtctttgcacagatttttgccgagaactttctgctttccgctctggctgtgctgcttgcgtgggtatgcattgaactgacccgggtgcccgtgtcccgctttttcgggtttgatttctcttatacagctttcgatgggtatttgtccttggtgttacttgtattcctgccgttgatggcctcgctttatccgtatttccgtttcacgcgtatcttgccttctgtcggcattcgtctggtgagtacggccgggcagtcggtacgggcgaggatgggactgttgctgttgcagtatgtacttaccttgatattggtggtactggcattttattttaatcgtcagcttgatactttgttgaataccgaaccggggtatcgtacggagaatattttagtggcgcatctggcgcacgaatcgaaagatttttcttcctatcagaatccggaagacatacaggcacgtgtgcagcgagtgaaacaacttggtgccaagatgaaagcttgccctgatatagagtattgggtagcggatcaatctgcgctgacttccagtgattttggaatgaagtttataggaaacaacgggcgtacggcttttttgtatatgtggtatgccaatccttctttcttccggctttatgagctgcgttttgtagagggaacgcttccctcaatggaagaggaagaagattgggacagggagtattatgtggtgaaccgtgcggcactgaaggagttggggtatgattcctgtcaaggagctacattgatgtatgaagatgacaagatgagggctcaaaacccggaagcgcattctattgtagcggttatcgatgattattatgacggacatatcagtgcgggtgtgcatccgatggtatttgtggtgcgacgtggctcttccggtgacctgtatacgttgtcattccgtccgggacgtctggctgcggtgatggattacttgaaaaaagtggaacgtgaaatatatggcacagaggaatttgaatatacgttgttttccgaccaggtgaaacagatatatgcggcagaccgtcggatggcaatgctttacacttcgtttgcctttatcgccattgtcgtatcctgtctggggctgttcggcatttccctgttcgacatccgccagcgttaccgggagattgccatccgcaaggtgaacggtgccatgctgaaagacctgtatgtactgttgcttcgtcgttacgtggggatgctgttgctggcagccgtggtggcagtgccgctggcttggctggccatccactactataccgccgatttggtggtgaaggctccggtgacggtcggtctgttcctgacagcctttctgatagtagcagtgatttctgtggctacgttgctctggcaggtgaacaaggcttcccgtatcaatccgagtgaagtaatgaaaagtgaataataaaaaaacaaatttatatgaatacattacgctatggattacgtttcctgctccgtgcacggacgtacacactgattaatctgttggggctggcattcagtctggcctgctgcatcattttgcttcgatacatccatcgggaactgacggtcgatacccattgtgtggaccgggaaaatgtgtatgtgtctcgttgtcagattggcgagaacgatgcattggtctcttccacattgaatggtgatacgctggctgtagacccgtcactggtcatgcaacgttcacgggtcacactgctggatcatgacatgatacgttacaaggacaatcgtttgcaggtgaatatgatagtggccgatacgacctttctgaaactgttccgttatcagcttttgcaaggagaatattccctttcaaagccagggatggctttgttgagtgagcatctggcacataagttgtttggtaagcagaatcccattggagagacctttgtcctgtctaccgggaaatcagtgacggtatccggaatcttcgctactccagaaaacaagtctatcttgcaggtagatgccattctttctgaaatgccgggagcactttgggaaagaatgcccatggagtttgtccgttttgtgccgggagcggatattcagaaattaaatgaggcaggcaagatcttgcgtcctacgcaggtgggagatggcagtatgtacactttctccctcctgtcactgaaggatgtatattgggagtcacgcttgttgtaccgcacttctcctacgatgtgtgtgtcgggcaaccgggctcagttgtatgtcttgtcggccatgtgtatctttatattctttatcggcctgcttaattacatcaatttgtatgcggtgctgttgggcaagcgattacggatttatctgcttcatcgggtgtggggagcaggctcccgtcctctcttcatgttggtgtactgggagaatctggtgctgtcggtcttgtcgttgttgctggcctggacggtggtggaacttgtccaaccttttgtcaaccgtttgtttgacacggtgtttaccgtagggacgtttgatgtatgggtatcattgtctcttttggtgtggttgccgttgctcatatcattatgcacggtagttcggtgctggaaatccccgttgggtatgtcgctggttcgttcggggaatgacaggaagtcaatacgcttgcgtcagggatttcttttcgtgcaatatacggtaaccattgtactggttgtccttgccttgttcttccatcgtcacctcaacttgctgttgaatactccaccgggatttcaggtggaaaatgtgattcatgccaacttagtgtatgagtcgactgactatgcctcttataccgatgaatcgatacaggcccggaagcagcgtgttgctcagattgatgaggcgttgagtaaatgtccagacatttcatgttggacagctggtttgtattccattttggatttcgactatacggcggagtttcagaatgcgaagggagaaaccgtttcattgaatcagaattttgctactcccgaattctttaccttgttcaatttgaagcttgtggaagggaaactacctgttgaagaagacgggtttgtggtgaatcgggcggctttgcgtgctttgggatacacctctttagagggagctaccgtgttggatttccgtatgaaagaatttgttccggatttgccggcccgtcccattgtaggagtgatagaggattattatagcggacatatctccaaaggggtacgtcccatgctgtttatggtttctcctactatgcggggagacgtgtatcagatagcatgtcagccgggcaaactttctcaggtgatagattatctgcggaagctggaaagggaagtatatggtacggaaaactttcagtattcgttgctgaaggacgatgtgcagaagttgtataaatccgatcagcaggtagctaccatttactcggcttttgcctttattgccattgtcatttcctgtctgggcctgttgggtatttccttgttcgacatccgccagcgttatcgggagattgccatccgcaaggtgaacggtgccatgctgaaagacttgtatgtgctgttgcttcgccgttacgtggggatgctgttgctggcagccgtggtggcagtgccgctggcttggctggccattcattattataccgccgatttggtggtgaaggctccggtgacggtcggtctgttcttggcagccttcctgatagtggcagtgatttccgtggctacgttgctttggcaggtaaacaaggcttcccgcatcaacccgagtgaagtaatgaaaaatgaataaagaaaagcaagaatgaatctatgatgattacgcattatttgaaagtagccttccgcaatttgtggaaatacaagacacagcacctgattgcgttggctggagtgggagtggccttgctgtgtttcagcatttgtttgtatttagtccgttatgcttttagcatgaatcattgttttgcaaactatgaacggattgccgaactcaatattcgtgacatgaaagaagagaaggtgttggattgtactcctgcgacgttggccgaggaactgcgtcttcaaaagccggatgggattgaggcgttgtgtgtggtggattattcaccgatagaacggcctttcaacgtggagatgcccgacgggaagcagttaccttattccttcgccgtggcagagacggattcttcctttttccaagtattgactcctaagattttgtgcggttcggctgaagtgagcaagatgatgccaaattcattggtcgtgagcgaaagtatggcacgccgggtatatggggatattcgacaggcggtaggaaaacagctggtactgatgcgccggttgtacacttcgccggattctactccacgtaccggtggagcggtttataccattcaggcagtgattgaggatattccagagaacaacagtattgcttttatgaagcatctggatatgttttccctcaacgattcggaaggaatcatccagaatgatgcccgttatgccattatcagttcctttacgtatgcgttgctgcgtgagggttttactccggagcaactcaatgagtggttttatcgtagtgaacagacgcatcggatgcatgatacaagttttgcggtggaagctcatctgatgggagatagggactggaatgggggactacttcgtacgatggtatggactacaatggtagccggggtattgattttactggtggccttgcttaatttctttcatctgctcgcggggtctttccttactcgtatgcgtgaattcagtatccggcgagtggcgggagcgtccggaggcagtcttttcgtccaactgtttacacagtctgccttgttggttttgctggccggcctgttgaccggtgtctgcatcgaggtgatggctccctggttgagactggaaatggccggattgtatttgcagtttgacgcttctctgttgatggtacagagccttgagtatctggctggtttgttgggagtatgtgcttgggtgtgtggaatagtcgtgtggaaggtacgtcgcatgcaggtgcatgcaggggtgactggcggtgtgcaccggggaggaaagagacgactgcggaatctgttgttgggagtgcagttgttcatctgttgggtttttatctcactggcagcggcactttatctgcaatcggataaaacgggacgtaccttgttcgggacattgagcttggaggaaaaagagcagattttgagcattccgatggatttttcctttatgaacgccgtgcagaagcaggatctgatacatcagtttaaaaacttgtcgggagtcgaagaggtgcttccggccgacatcaattatttgggaggtgtttccggtacgggtatgtatacggagaaagataataaaggcagttatgtggatgtaaatgtgatgcgtataacttccggtttctttcgtttcatgcacattccgatgcggtcgggacatacgccgcgtgaatcgtccgatttggtgatagacgaggcattatctcatcgtctcggaacggacatcatggggaaaccgctttataattttgacggagatgcctacacggttaaaggagtgtgccagacatttgtgtccagtgtgtattatgatagtgaaggatttatattcctcctgagcgggttcgatgattattgtgggcattgctatataaaatgtaaggaaggacaggcggaaaccgtctttcaggaggtcaggaagatactgaaaaagacgttgccggaaagtgtggaagtgaaggtaagcacgttcatggacgacatccgtgagtcacaggcgcttgagttcaagctccgcggaattgtattgttcttttcggtagtggtgctggtgatttcgttgttgggcgtgtattcagccgtgaccatcgacacggaatatcggcggaaggagatggctatccgaaagatcaacggtgccggaatgcgtcagatagtctggctgtttgcccggctttatgttactttactgacggtgacggctgtgttgggatttgcgttggttgaattcttgttgaggcagtttagtaccttgtatacggtgttcttccagcatggggtggctttctatttttgcctcttcctgagtgcctccttgttcgtcgcccttacggtagctttccgtatttggcaggtatcccgggtgaatccggcagaagaaatcaagcgggagtgatataaatgtagtataataacctaaaattgaaaatatccatgagaaaacaagtattagcctgtctgctcttaggtgcattgggggcacaggcacaggagaaatttgtggtggaaggtcagttgaagaatattcccgacggaaccgtgttctatttgatgaagcaagagggtaacgtggggagtatggcagctaccgatacgctgcagaacgggacattccgttttgaactgactaccgccggaaacgagctggaaggttatggcttgatggcacgtgatgatacgaaattcccacccatgttgcttgaactatgggtaaatcctggcagtcatctgctcatacaaggagagaatccttatatttactcctggaaagtagagagcgatgtcaaggagcagcaattccagcagcaactgatacaggcttcccataaggaatgggaggaatttcagcggttgaccatgcaagaatttgcactgatgaggtcggctgcgcagggaggaaataaagaacaggtccgtgcgcaagcagacagtctgcaacagctgacagagaagttgagtgatcagattgcccagcataatattgcgattatgaaacaatcgccgattaatgcagcctggatgggtgaattgcatcggatggggatgtcggttaagttccgtaaagattatccgtataaaaaagaagtgcagcagttgtacaatctgctggatgacgcacagaaagaaacgtccattgggaagagtgtgtatctggccttgaatccgccgactgtagtgaaagtgggcgaggaagctgccgatgcggatatgtacgacttggaaggaaaggttcaccgcctggctgagtttcgcggaaaatacatcttgctggacttctggagtcggggatgcggtccttgtatcatgtcgcaaccggaactgaaggaaatcagtgaaatgtacaaggacagcctggaggtgatcagcctgagcattgagaaccggaagggatgggaagaggcttctaaatcgcatgccatgacctggaataattggaacgatttggaagagaacaacggactgtatgctcgttatggtgtcagaggaattccccattttgtattgatttctccggaaggaaaggtggttgacagctggagtggatatgcaaaaggttggctgaaactgaaaattaaaggctcgatggctcccaaacagccgatgcgtatcgaatggaaagacggtcacaaactggtgcatcatccgcggaagaaaacagaaaaaatggaggtgctgaccatctgtcaggtggagttgaccgactcggctacggtacttcgcgtgcatgcacggtatattccaaattattggattcggttggacaaagcgacttttttgatgtcggacaagggggtgaactatccgcttctgcgcagtgaaggtttcgcgataggcgagcaggtgtttatgcctgatagcggagaaatggatttcacgctctattttgctccgctgccgaaagatacccgctggtttgacttttcggaaggcgagcacgtggaagggggatactatatcgaaggcatccgtctgacagaataagaaatgaactaaaaaacgatgtgttatgatactgaatgtagtattgaaaatgattttgcgaagctggtggcgtaacaaggtgtttttccttgtttcggtagccagtctggcattgggattggcttgcaccaatttgctgatgacatacttcgtgcacgagcatgggttggaaggacgtaatccggaccgtgaccgcatgttttttctgcggcaggatgacccgatgacggaggggaaacgagtggcctttgccggcgcagagattcctccgcagctgaagcaaagctatgccgaggtagaggactttctccggttaggaaaactggatttgctttactgcaaggtgaacgagcagaaggtggaaggtgattttaagatgttgtcggccgatacgaccctgacgaacttttttgattaccgtacggaagaaggtagtttgagtcaggtactctgtcaaccagggaaggtcgcattaagtgaagcttgtgcccgtcgtctgttcggagggaaacaagcggtagggaagcaggtggaggcacatttccgctttggagaggtccgtacgtatgaagtggcggcagtacttaagaagcgcgaacaatcgcttctgcagtttgacatgttgatagcacacgaccctgatttcttctggggtggacttacactgctgaagctgactccgggtacggatgcgggtcacctggccgataagctgaatgaggacaaggtacctacactgatgcccggtcagacaaaatattacctggatccgctggacgccatttgtttcactactcctgatgattcctctcagcagacacttgatttcgtcagtcagacacccgcgcagactctctatatcagtctgctggcagccgtgctgatactgattattgcttgctgcaactatactaacatgagtttgagccgcttgttgcaacagcttcgtatgattcatgtggagaaattgatgggggctaccttgcgcaatatccgtctgcaacttttcggggatgcttttctgacggtggtgctggcattcggcttgtccattctgctggtcaacgactgtctgtcactgtttaatgacctgttgggttcgcggttaaccatgacgttcttcttcagtagtcagatgttgccgtggttgctgttattcattctgttgatgtcggtaataccggcatggtacatcagttgtcgcctgtcacgcttgtcgttcacggagtaccgtaccctttacagcggccgacgcaaacagcgttttgtagcggtactagtaacagtgcagttcgtgatttccatcggattgttattggctacgctgacagcacgcaaccagatggaactgacccgccagcgggcttcgcgttacgagggctgcattgagataggggatgcctttggtactccgttggctaccttcaaggcggaactggagaaacgggtgaaagggattgaatccatgacactttccaaggcttcggtgcttaatgcctggatacgtcagttgaacgtgctgcgtcccagtgggaaggaagtacgtaccaatctgctgacattggaaggcgactccaccttgttgcgcaccttgcgcattgaacagttgagtggagaatctccttcccgtctgttggagcgtcaggcatctccggtactggtgaacgagagttttgtccgcttgttagtgcctgcgggtacggaggtcgtggggcatgccttgcgcgagttcgatacggaaacgaaagacagtctggctgtaatcgcaggtgtggtgcgcgacttttccgtcaattcgctggaagaagcggtaacacctcttgtcatcacattgttgtcggcaagtgacttgcagaaaggattttatttgcaactgcgtcttcgtcctgaaaaccgtgaagagaccttgcggcagatagaagccgtatggaatgaaatgaaccccaaccaacctttcggttatgcagatatgcaccgggattttatggcacgtaacgggaaagtgctttctttgtcacatattctgactttctatgccgtgattgggttgttgctgacaggtttcggattgtttggtatcgcctggtatgccacccgtcagcggatacgcgaaattagtatccgcaaggtgcatggagcaacacggggacagattatctggctgcttaacaaaccgttctgtatctatgctgtagtggcgtatgtaatggccatgcctgtcggctggtggttcatgctgcattggctggagcagtttgcgtaccgtgccccgctttcggccggtatctttgtatggccgttgttggtggtgtggggcatctcggcggtcattgtctgcctgcagggttggatattgagtcgggtaaatccggtagaatgtataaaacaagagtaatatcattaaaataaaattttgaagtatgattaagacagaaaatttacagaaagtattccgcacagatgaagtggaaacttgggcattgaataatgtaagtatcgaagtgaaggaaggagagttcgtggctatcatgggtccttcaggttgtggaaaatctaccttgctgaatatcttgggattgctggacaatcccacgggaggcaagtatttcttgaacggaacagaagtgggtggctatactgaatcgcaacgtacttccttgcgtaagggagtgattggtttcgtattccagagcttcaacctgattgacgagttgaacgtatttgagaacatcgaactgcccttgctgtatttgggtgtaccttcggcagaacgtaagcggaaagtggaggctgccatggagcggatggggattacacaccgtgccaagcacttcccgcagcagctgtcgggcggacaacagcaacgtgtggctattgcccgtgctgtagtatcaggaccgaagctgattctggccgatgagcctaccggtaacctggactccaagaacggacgggaagtgatggaattacttaccgagctgcataaggaaggcaccaccattgttatggtgactcactcgcagcatgatgccggttttgccgaccgcgtcattaatctcttcgacggacaggtagtgacggaagtgaacctttaaaatagggtttaggcttgtttttttaactggccgggcgacactccgcagtagcgtttgaaaaacttgctgaaagaagcttggtcagagaaacagagcttttcggccacgtcctgcacgctgttggccggattgagcagacagactttcgcttcttctatcaggctttcgctgatgagctggttggctgtcttgccatagagtttctttaacttggccgataacgcatcgggggatacgtagagttggtcggcataccattttacggtgtgatgataacggcaattggtatgcatcagatatagaaaacgagggagggtatctttccagcggaaagagtgctcgaactcgttttcttgtttatacatgcggaggataatattccacacttccaggatgagggaacgaagcgtgttttccagcatttcaagcaggaaatgattctctttttgctgaagggtgtggcgtagcatgtccacatgtgattgtatccggagaagatcctgtttctccaatggaataaacggctccaatacgtgtctgtatacataggctgccactttggaacggatgcattcggctgcctgcaaaaaaatctcccttcgggtaatgagcagacatccttcgaaatcacggtttgttttcaggtcgctccattggtggggttcgataaactcgatgtaggaaggggcaggaatgacggtccgcttgtcgttggtctggatgctgatttcgccttttaatacgagcaaagacaccgtatgctgtgtgtcgatacttcctttctggaattgattttctccccgtacggtgaagatgcccatttgttcattgtacaccatatctcgctccgttccgtctgcttgcagcgtcggaaccagccattttgtaaacgcatattctttcatcttgtatctcgttgttgtatttgcgcatctaaaatacagacataaatcgtagcctgaaaacctttttgtatgttttagaaatcataaactgaataaatgctaaagcacggattcagacaaatgttcttaggaatggaacaagtaagtagtctttcccgccttctaaatttgcatcggctattacaacagaaagagtcaaatcaactaaaaaaagagaataagatgaaaaaagcttttgtatcagttggtgcatgtttttgtgcgttgttggggatgctgacagcctgcacgcagcctgcacctacctcacaggaaagtgggtacaagaccatgaccgtgaaaaaagaaaatcgccttctcactaacagctattcggctgtagtaaagggaagacagagtgtggaaattcgtccgcaggtgagcggtacgattaccgagatttgtgtgaaagaaggagccaaggtacacaagggacaggtgttgttcgtgattgaccaggttccgtataaagcagctttgcagacggcattggcgaatgtgaaaagtgcggaagctgccgtggctacggcccgcctgacgttcgacagcaaggaagagctcttcaaggagcgtgtggtttcggatttcgaccgtcagacggcacagaattctttgttggaggctgaggctagtctggcacaagcgaaggccaatgaaaccaatgcccgcaacgacctttcctatacggtagtccggagtccggtggatggagtggcaggtatgtcttcctatcgtgtgggggcattggtcaattcttccattactacgcctttacttactgtctcggacgatgaggaagtctatgtatatttttccatgaccgaaaatcagatgctgtcactgctccgtcagtatggtagtgtggacaagtcactggccggtatgcccaaagtatccttgcagttgagtgacggagtgaaatatgcacacgaaggggtgatagatgccatcagcggcaccattgataccggaacaggggctgtcagcctgcgtgccgtgttcccgaatccggaaggaatgttgcgaaacggaagtacggctacgctcgtattgccctataccaaggagaacgcgctggttgttccacaggaagctacttttgagattcaggacaaggtgtatgtgtataaggtgaatgagagtggaaaggccgagtcggcacaggttactgttttcccgctgaacaacgggcaggaatacattgtagagagtggcttgcaggaaggggaagtaattgtggccgagggtgccggattgattcaggagaatacccagattctttcgttacatactgaaaaataggaggggacgttatgaaactgaagacttttatcgacaggcccatcctgtcgtgtgccatttctgtgctcatcctgatattgggagtaatcggtttgagcaatcttcccatggagcagtatcctgatatcgcacctcctaccattatggtgtctaccacctatacgggtgccaatgcggaaacagtactgaagagtgtcatcgctccgttggaagaagccattaacggtgtggaaaacatgacgtatatgacctctaccgccaccaatacgggttcagcgtctattaccgtgtattttgcacagggaacggacccggacatggcgactgtcaacacgaagaaccgtgtgtcggaggcggaaggactgttgcccgcagaagtgaccaaggtgggtgtgaccgtagaaaaacggcagaacagtatggtcaagattatatcgttgtacagtcccgacgatagctacgaccagaattttatcaataactattttaaaattaatgtagaacctcgtctgtcccgtatctcgggagtgggcaatgtgaatgtcatgggtggggattatgccatgcgtatctggatgaatcctcagaagatggcccagtatcagctggtacctgccgatgtgattgccttgctggatgaccagaacgtggaggcggcgacaggtacactgggcgaggattctgaaaatacatttcagtacacgttgaagtaccggggtagatatgagactgcggaagaattcggcaacatggtgctcaagtctctccctacgggcgaagtgctccgcctgaaggatgtggccgatgtggaattaggttcgcagagctatgcctataacagtgaaattgtgggtcaccccggtgcgacgtgtatgatttcgcagacggccggatcgaatgccaacgagattgtgaaggaagtggacaagctgatggaggaaatctcaaaagacttgccgaaggggcttgtaatggccgacctgatgagtacgaaggacttcctggatgcctcggtacacgaggtggtgaaaaccctgattgaggctattattttggtggtgctggtggtttatttcttcttgcagagcgtgcgttccaccatcattccttcggtttccattatcgtgtcgctggtgggtacgtttgccttcttgtatgtggccggattcagtctgaacctgctgaccctttttgcactggtgctggtaatcggtacggtggtggatgatgccattgtggtggtggaggccgtgcaggccaagtttgacgaaggctaccgttcaccttataaagctacggtggctgccatggatggtatttctgcagccattgtgaccacctcactggtatttatggccgtgtttatcccgacctcgttcatgggaggaaccagtggagtgttctatacccagtttggtttgaccatggcggtggcagtgggcatttccgcaatcaatgccttgaccctcagtccggctttgtgtgccctcattatgactcctcacatggataagtcgaccggtggtaagttgagtttttcttcccgttttcaccatgcatttgaggcttctttcaataggctggtgttgaagtataagaatggggtgtcgttcttcctccgtcgtaaatggatggcctgggtttctttggcggcagtctgtgccttgctggtattttttatgcggaccactaagaccggactggtgccggatgaggatatgggaaccatattcgtgaatgtcacgacccctccgggaagcagtttggcccagacgcgtaagacgatggaaatgatagacgagcgtatccgtgagattcctcagataaagatttattccaatgtgacaggttacagcatgatgggcggacaggccgcctcgggaggtatgctgattatcaaattgaaacactgggatgaacgtcaggaggcacaggatcacatcaatgccatcattgcggcgatttacagcatacagccgacattaaatcagccaagctctttgcctttgcgcagcctaccatcatgggatacggaatgggtagcggtttcgaaatgtacgtgcaagaccgtgccggaggcagtgtggagaatttgcagaaatatacgcaggacttcattgcagccttgaaccggcgtccggaaatttcgatggcttacactactttcgataccaagttcccgcagtatatggtcgaggtagatgcggtgaaatgtcaacgggcaggggtgaccacgtctgatgtgctgagcgtactttccggttatatcggcggtaattactcgtccaacttgaaccgtttttccaaactgtaccgtgtgatgattcaggcccggaaggattaccgtctggataaagagtcgctcaacaacatgtttgtacggaccgaaagtggggaaatggcgcccgtgggacagttcattacactgaccaaggtgtatggagccgaaaccttgacacgtttcaatatgtacacctctataccagtcaacggtatgccggccgacggatatagttcgggagatgccattgcagccattgaggaagtggcttcacagacactgcctaccggatatggctatgagttcagcggtattacccgagaagaatcaagcagtacgggaaatacggtgattatttttattatctgtatcgtatttatctatttgattctctgttcgctctatgaaagtatctttattccgatggtggtcatcctggcagtgcctttcggcttgatgggaagcttcttgtttgccaaatgttttgggctggagaacaacatctatatgcagaccggtttgattatgctgattggattgctttcgaaaaccgccatcttgctgactgaatatgcttcggctcgtcgtcgacagggaatgagtattgctcaggctgccgtagctgctgccggagttcgtttgcgtccgattctgatgaccgccctgacgatgattatcggattgttcccgctgattgtggctaccggagcaggagccaacggaaaccgttcgttgggagtcggtacggtagggggtatgcttgtcggtacagtggcacttctgtttgtagtgccggtgctgttcacggtgtttcaggcaattgaagaacgtgtgatgcctcgccgtcagaccgatgcagcggaataatcccttgtgggggaattttatatcaactaaagaaacattcgatatggagaaaaatataagtcatatagtagttgccgcgtgcatggccagtatgctgaccggatgtggtatctacacaaaataccggcagccggaaacgaataccgacggattgttcggcgctcttccggaggaggtggatactacctcctcactggccgacctgaaatgggaggaactgtttacggatgcatccttgcgaaaactgattacacgtgcgctggaggcgaatacggatttgaatgtggcccgtttgaaagtggaagaggcacgggcttcgctgtcagctgccaagcaggcttacctgccttctgctcagttggacctggaaggcgctttgagcagttttgacggcagcaaacccaccaagacttattcgttgggagcttctgccagttgggaactggatttctttggaaagctgaccaacgccaaacggagagagcgtgcggcattggagcagagtgaggcgtatcgtcaggtggtgcagacacagcttattgccacggtggccgagagttattacacgttgctgatgctcgacgagcaggtagccgtaactacggaaacggtagaaagctggaaggagtatatacgtagtttgaaggccctgatgcgggccggacaggccgaccgtgcgaccgtgaaccaggcagaagcttcccgattggatgccgaagcctctttgctggatttgaagcaacaggtgacggaaacggaaaacacgttgtgtgccctgcttttctggactccgcagcctattgcgcgcggcacgctcggtgaagtggattttccggaaagtttgtcggtgggagtgccgctgaatttgttggccaaccgtccggatgtgtggcaggctgaggccgtacttaaacaggctttttatgccaccaatcaggcacgctccagtttttatccgagcgtgacattgagcggttcggccggatggacaaacagtgggggagcccttgtgaccaatccgggtgcctggctgcttcaggcggtaggctctctggtgcaacctctttttcagcgggggcagcttatggcaaatctgaaaatcagtaaggcacagcaggaagaagctctgctacagttccagcagaccttgttggatgccggtgcggaggtgaacaatgccctgagccagtggcagacggcccgtcagaaaacggtactcgaccgtgagcaggtggagcatctgaaagatgcgttgcgtgacacggaactgctgatggaacacggtacgacgaactacctggaagtgctgactgcccgtcagtcattactggcagcgcggctgtcgctcgtggccgaccggaatgcggagataaaaagtgtcattaccctttatcatgcgttgggagtgggaaacaactaacatataggttgatatgaagaagatgatgatggttgctgcatgcgtgggaggactcgcatgtatgctggcatgcaataaagaagaggtgggtgcatattactccgcttcccaagattcacttaggagagacgttcaaatataaatgtgagccggagaattacatccggctcgaatatgatacccttggtgaggctgctgtcttgaacttttataaagatgaaatcacctcattggattatctggagtacgatgaaaactcgtgtactttctcctttcataaaggagagacggggctttatcgtatcagttgggagtatacgtcggaaaataccttgcggatactttacggacagaatggtatgtggtaccggatgaatgcaagcggtacccatgaatatctgttagaagccaatgacgggatggcaataaaggtcatagcttaccgcacgaactttgattctttgcattgcacgataaatcgtttttgtattgaagaatacaaaaacgaggaataggagtgaaccgaagttccggcctgctttcaccttcctgaaggcagtgccggaatatcggcctctattcggttttccacgttgtcggggagcttggagaagaaatccatccccgttactttttccacggagtcaaccgataccatgtacttttccagtgcctgatgatgcgccttgttgtcgaacagaaagcccatggcgatgggacttttccggttataaatcagcaccaccttgaagaaacggtcgggcacggccacccgatgttctccgatgcgcttgggttgctttttgtcatagataggtccgcaggcaatgtacactgtgccatatttccgggcccagctgcggcataattcttccaaatctccccagtcgtcccggttcagtttctgattctgcggacagatgttgctcatgtagaacgattcctccatggctttcttgctccatttcatgtcggccgccggagccatgtgtccccggtcgtatccggagtgcgtataatcggcatgctccacacggggttcgggtaaatccgggtcgggcgcgaagcggttctttcgctcttcacttcctttggtttcctgccgtgtcagttcccaggctacccagttgggggttttgtagaaattattgtatgaaacggtatatcccgttcgctgcaacttgatttcttcccgtttggtcagcatgacgggaatttccagtttgctgctgatgcggttggccgagggttgtgactccgcctcgtcctgcggcttttccggcaggcgttgtgccacttccttctgtgccttctccaatgtgtgcgaaagctcctttgtcagttccttggcttccggcagattctgctggttctgatagaaataggcaccgccacccaaaatcagcaacaggagtatgaagcttttcagggagccggtggatgaacttctctttttctttcccataatgtacgtgtattaaaccagtttgaaacgcatccggaagataccgtcgttaaagtcgtgactgatgatcttgaaggtgccgatttctgatgtattctctacatgctgcccgatgcacaagcactcgtcgtagtcgcctacgtgtaccacacgaaccgtctcggaagctccttcaggcagccgtttcatgtcaaagcgtccggtagcttcttcctgtgtgataaattccgtagtgacaggaagatggtgtgcgattacttcgttgactgtcgtttcaatgcgtgcaatatcgtcttccgaaggtgcttgcgaaagcgcaaaatcgagtttgcttttcttccgctcgatatgggcagatacagcccgtccgcatccgaaaaggttgaccatggtgcggttgatgatgtgttcgcaggtgtgcataggaggatactcctgcttgttgtgtgcattaagttggatttcttgttccataaattacattgatgaattgtttttttctttttgctttttttctatcagcatgctcatgaaggccgagctgatgatacctgtaggaatggcaatcatggcgatgccaatcaggctgatgatgctgctcaatagccgtcccaacggagtaatcgggtaaatgtcgccgtaacccacggtagtgaaggctacgattgcccaccagaatccgtcgccgatattttcgaaggcttccggttgtgcgtagcgttcgatgtagtacatcagaatgccagagaaacctaacatgatgccacaggcagtataggccgtaacaagttcttctctgacggttcggagtacggtgccaatcatctggaaggaacgtgaatagcgtatcagcttgaagataatcagtacgtaggccagcactacaagatgtacgtgcggggtttccttgtacacataaatcaccatgaacgggataattgccacgaagtcgataagaccataaaaggagaacaggtagcgcagacgtgctttccaggcatggttgcaactggcatactgcacgggagcagccacgatgcgtaatccatattcgatggtgaatataaaggaggccaggtagttgaatgcatacaggatattatggtagggagctgattcctcgaaagagctgtatatgatagagcaaatggaaccgatgataaagaacagcacaaaatattgaaaccattttttcatcagctggcgatggatcatccggtactgcttttcgtggcgaattaggtgcgggagcttctcgcgcagcgggtctatcaagttgtgaggttctatgttcatggtcgtgattttaatgaatgatttttcgtgtatcaggcaaatatactcttttcttttgcaataaaggagaaagtggaagaaaaagaaattagaggtacggaagggagagcttaaattctcctgaaaatgagccctaaaactgatatttttcatgtctgaaaaaacgcctttgcgttccatccaaaacgcccttgcgtttgaactaaaacgtccttgcgtttgaagtgaaacgcacttgcgttttatatcaaatgtacttgcgtttttttgaaggctgaatatgtgccgggaaatcccttcatttccgttag

SEQ ID NO: 3757 - DNA, 47107 bp, Unknown
  gut microbiota DNA sequence
gaaagtttcaaaattgccgttgatgtacgtttccaccatatacacgaagatgttgtccacctcgtaatatctgcactgctgcgctgccgtcttgctgtttctttttgccatgtcggtaagggttaaagggtgaataaccaaaggatgaagccaaagaaggcaatggtggaaaggatagccacgattacacctatcgccactcggaacactccgtttacaatctctctgatgatgccccaaaggatgccgaacaccccgaaggcggtgcgcatcatcaagccgcatatcgccaacccgatgtgttgcgccatttgtctgaaatttgccgttgccgtcatatcttcgctgtttttgatttttttgtttttaatgcggattcaagagctgagggagttgagtttcaaactatcttatctgcctctcgtttatccgacattttttttatgcgtctttctgtcgcatcggtcgttttcgtttcgggtgcttgaaaaggtagggattagggaatgcaaggtttttcggtcaaaatactacccgcagggctggagatttttaccgaaaacaggaggcttgaccttgctttcccgtccaatcccggaattacctttgcgcccagaacgaaaatgactgactgatgcggcttactgaaaggcgcaaaatggaggtaaacgaaaacagaggcagattgtgtagaaaaaaacttcaggggaaaatccgtaaaaaaaagaatcaccaaaaggaaaaagacatcaccggaagcgtgaaaagggcaaaccacaacaaaggaagtatgattgtttccgatccgacggaacttgttcagccgggtggcaacaatcattcttcccggtttgtccggctgtgtgtgggcgcctgtttcattcatggggcaggctgacacactctgcattcactttccgcttccggcaaaagagacagcgaaaaaagaaaaatcatttgaaaacccgtaaaagcacctcttggcataggcgcaaaagaaaggggcattgcttcatctgtctaaacatcgtttaggcgtgaggcaatgcccttttctccagctatgcggtagtcggcacacgtttgttccaaactcgttttgggcaatggtgtgccgacggacaataccgcttttacggaaaattcttatgaatgaggggataaaaaacgggagtttatatcaaaatctcgaattaaatagctacttttgcatacgaagagttctttgaaggttacgcaacgcgcagaaggataatgcagtagataactaactaaatcgtaacctattactatcaagagcaattaacctacgctcatttccaataaattacactcttttcgtaacttcgtgacgcaaagatacataaaattttcattctgctttatgtgcatgactggctatatactctcccggtttcattccgaattgtttctggaaacacttgctgaaataagacggattattgaatcccaccatgtagcttacctcattgatgcggtactggttttccagcaagagagaagccgctttcttcaggcggataatctgaatcatttcattcggtgttgtattggccagtcctttgattttcacaaataatccggaacggctgatacataatttttcagccaagaagtcgactgacagttcttcgttgttcaggttctcttcaatcaggtggttcattttctccaggaacactttatcactctgattggccgcaatggagttgatggaaaccgtcggcatttgtgagaacttttgtcgtaactgcaaacgcagttctaacaggttcttgatgcatgcctccagatattgcaatgagaacggtttctcaatataggcatctgccccacaattcatactcgtaatcttggcttccgtatcggtctttgccgtaagcaggataaacggaatgtgactggtcagctggttgtttcgtaccgctttacacaaatcaattccattcatgttcggcatcatccagtcgctgataatcagggccacttcctgttccttcagcttgttgagcgcatccaccccatctacagccgtcacaatggtatagctggtctgaaagtgagaagagaggaagtgtagcatatcttcgttatcatctacaatcagcatgatggggagcaccttctgcgacatggaagctgtggcattctgctctgggataatatcttccggaagcggactgcctgcctgattttcttcctcttcagccgataggttttcctgtttttgaggaagagtaatcatgaatgaagaaccatgcccttgctgggaagttaccttgatctgtccatgatgtgcttctactatcccctttacgatactgagcccgatgccggttcccggtttgttctctgaagcctgatagaaaggtttgaaaatctttttcaattcctcttcattcattccttttccattgtcttttacttctatggagaaggtctgtttttcgggatgttcctgaaaacggacctcaatcctgctttgcgtatatttgttggcgtttgtcagcaggttgcttagcaccttggtaagtgcttccttatccacatccgcatgaaaatgttcattgggataagtgacggagaagttgactccattttgctgaagtgtcggtgagaaacgttcacatacagcctgcatcagttctttgatggattgtgagctgaacttcatccgtatttctttttgttccacttttcggaaatccagtaactgatttaccaggtacagcaaccgttggctgttacggtcgataatctccagttcctgacgttcgttggtaggaatatgggttgattgcatgattttttccaacggtccgatgatgagtgataccggcgtacgtatctcatgcgcaatcatggtaaagaaattaattttagcttcgtgaatttctatttcctttttgctgttcagctcgtcaatggctttggcatgtttcttctcactgcgccgtatgacgtagcgtagcaaaagacctagggcaagcaagaacagcaacacatagccaatcttgaaaggcagagacagatagaaaggcggatgtacaatgatacggatggaagttccttcttcgttccatatattgtcattgttggaggctttcactctaaaggtgtacgtgcctgccggaaggttggtataggtggtgctgtgctgtgaacctacatagttccagcctttgtcaaatccttccagcatgtaggcatactgatttttctgtggagtgcaataacttaatgccgcataattcagggtaatgacattgtctttataagaaagatgaatttctttcagatggtcgatggcttccggtaatgtaccgtctttttgtgtgtcaattttctgattgaaaatttccaggctggtcaatactacattcggtttttgtgtattgagtttcaattggtgaggatagaaggtattaaaaccgttgatgcttccaatatagaactcaccgttgcgtgtttttaacgcagaggccatgatgaatgcttcactttgcagcccgtcgcttttagtgaaaatctgagtctcttgtgtggctggagtatatttcaccagtcctttggcagtggtaagccacagacagtcttctccttccaagatggcattgatacactcgttgggaagtctaagtggctggtaagtaaatatatctttaaggggattatataagtacagtccttcgctggttgcagcccagatttcattgtctttattaatgcatagatggttgacagttaggctattgaaacctttttccagaccatatttttcccattccttattcttttgtggagaatatcggaacagtccttttccttgagtggcaatccaaagatttcctttggcatcctctacaatttcaataataagtgcttctaaatgtttaataggggtaaaatgttgtttttgtgcgtcgtattgacaaattccattcattgagcctgtccaaatttgtccttgactgtctttaaaaatagaatagatgctattttcatccagaccatttgtggtattataattcttgatttttcctgtttgtgcatttaggacttgtataccgtctccgtatgtgcctatccataaatctttgcctactatgcagagtgcatgcaagttatgtttattcagcttttctcttccgtgaaaatctataaattgcattgtggaaggattgaagcaactgagtcctgaatcatcggatgcaatccagatattcccgttttcatcctcacagaaacggctgataattcgactgttgaagtaaggaatgtcgctggattcggagtagccgttgaactgtccacagtagggtggaagatagtttattccattataataggttccaatccatactcctccttctctatcctttaacataggatagataaatttatcggacaatgatttttcgctatctccgtaattatcatagagaaaactttcatgggtgacaggattaaatatcgtaagtccgtcgtctgaacctataaacagcagttctggagagtattcaagaatggaatgaatatgtaatattccttttccttctgtcaggtatttctctacttgttttgtttgtgggtcgagtttccagaggcctttatcccaggttcctatccaaatatagtgtgaattgtcttcccatagtgccatggagtagacgccttctgtttctccttcaatcgtataagtttcaaatgtgttgtttactttatttagtttgcaaagttgataggggcctgatagccatatattgttttgttcgtcattaagtatacggattacaatattgtcgttttgtggtatttcaaactgggtgagtttatcggtttgtgtgttaaatagaaagataccttgtttgtgtgtggcaatccatatatttccagctttatcttgaataatatgtgtaatccatgaagtgatagaggttttgtcacttgtttgtttgacaaatggggtaaatgtatctttaacttgattgtagatgaatacgccgttgtccgttcctaaccatagctttttgtcggtagtttcgcaaatggtattgattgaattggcgtggaaattggaatagagtggattgtttttttgataaagggtaaattggttaccgtcaaaacggtttaatccattttctgtacctatccagatatatcccttttggtcttggaataaagttgaaatattattggatgaaactccgttttcaatattataatggcgaaaatggaactgggtaggtaatatagcatagccacataggtggattgataggctaatgattagacagtaaaaggatttcatacgtgttgttttctttttaaatctttacaaagatgactaaaacatacgaataaagcatataaaatagtatagaaaaataatgtaaaagtctaattaaagattccggagcattgtcttgaactctccggtatattttttagaagtcttcagcctattccgtgaaatgccctaatatattctctgtttcacagtgcgggatttgtatcccacactgtgaaatatatatcccacactgtggtttttgtatttcacagtgtgaaacagagaatttgtttccatatttccttctttatctaaggatgtgtggaagaattattactatgataccattcttacaaggtgctgatgctgttcagctgtcagtataataatggcggcaggaagaatgagtgtctgcatgatagatgctaaaatagtcctgaaacatatcaaaaaaatctaatgtaattgtataactagttggattatagagtgttgtcatgttttagatatacgtaggacaccgactattttggtagtggaatggatgatatttttatcactccaatctttaaacttctacatttgcaacaaacgaataaagaacccaatttatataatatgaagaacaagcttttgatattgatgagtggtgtcgctgtgctgggaatcacttcctgcacaaaaccggcctatcagcaaccggatgctcctattcaggaagttccgtttacccaagtacatattaatgatggtttttggttgccccgtattgaaacaaaccgtacggtttctattccttccgctttcaaggaatgtgagaagaacggtcgtttcgataatttcgctattgcaggcggtttaaaaaaaggggaacatcgtggtgatttttcttttgatgatactgacccgtataaggtaatagaaggagcgtcttattcattggcggtgaagtatgaccctcagcttgatcattatttggatagcgtaatcaatatcattgcagcagctcaggaaccggacggatacctgactacctgtgtgacaaataagtgctatcgactttctggttggtggggacgttccaaatgggaaaaactgaacagtcatgagttgtataacagtggtcacatgtatgaggctgccgtagcacattatcgagctacgggcaagcgtacattccttgatgtggctatcaagaatgccgacctggtttgcaaggtattcggaccgggtgaaggacagaaacatgtgccgtcaggccatcctatcgtggaaatggcattgtgtaaattatataaggtaacgggtgacaagaaataccttgacatggcccgttattttgtggaagaaaccggacgtggaacagacggacacaaattgagcgaatacagccaggaccacaagcctattcttcagcaggatgaaattgtaggtcatgcggtacgtgccggatacctttattctggtgtagccgatgtggcagctctgacaaacgatacggcttattttcatgcgttgacccgtttgtgggataacctggtgagcaagaaactgtatattaccggaggtatgggttccagagctcagggagaaggtttcggcccgaattatgaattgcagaatcataccgcttattgtgagacctgtgcagccattgccaatgtgtactggaactaccgtatgttcctggctacgggtgattccaagtatgtggatgtgttggaacgtgccttgtacaacggcgtgatttcaggtgtttctctgagcggtgacaaattcttttatgacaatccgctggaatctatgggcgaacacgaacgccagcgctggtttggttgtgcctgctgtccgggtaatgtaacccgctttatggcttccgtaccaagctatgcgtatgccacccagcagaatgacatttatgtgaacctctatatccagggtaaggcagaaatgcagaccgcagataataaggtgacattggaacagactaccgaatatccgtggaacggaaaagtaaccattaaggttactcctgaaaaagaaggcaaatttgctatccgcctccgtatcccaggatggacaaaagcagctcctgtagcttctgacctgtatgcatataccgatgcggccaagaaatatacattgaaggtaaacggctcggctacacgtggagcagaaggtgacggctacgaaaccatcgtacgtacatggaaggcaggtgatgtaattgaactggaaatgccgatggacgttcgtcgtatcaaagccaacgataaagtggaagtagaccgtggaatggtagcattggaacgtggaccgattatgttctgtctggaaggaaaggatcagcctgacagcatcgtattcaataaatttattccgaatgatactccgatagaagcttcttacgaagccaatctgttgaacggggtgatggtattgaaaggtaccgcaaaggaagttgaaaaagacggtacagtgaaagacgttgcattcaaggccattccttattctacatggaacaaccgcggagccgaccagatggaagtatggattccggaatcaaaagaatatgcaattccaactcccgagccgactattgcttcaaaggcacagacattcaccattcaggctgcaatccagaaagatgcgcccgagtcggcagctgtgatgtcctacgcatggggcgtgaacgaccagtgggagccgaaacgttcttcagatacttccaagccctatttctactggtggttgaagaatggtacgatggagtctctggcctacgaattcgacaaaccttacaccgtatcgaaagtggaagtttactggctggattttgatcattacgacggtgatttccgtgtaccgcaaagctggacattgtattacaagtctggaaacagctggaaagaagtagaaacgagtgataaatatggggtagaaaaggacaaatacaatgtagtaaacttcaagccagtccagactaccggactgaaaatctcggcacagcttcagaaaggagcttcgggaggtattattgaatggaaagtagagtgatttattaacccttaaatataaacaagatgaatacacagttaaatcgcatgttgtttagtcgtgcatttgtaaaagtgtcggcatgtgtagtgctttctgcaggttgtttacctatggcaacctatgcggaatctgttggagcaccggttgtggagactgtcttgcaacaaaaggctatctctggtaaggtggttgattcaaaaggtgagtccattattggtgcaaatattatggagaaaggcacttccaatggtacgattactgattttgatgggaattttagcttaaatgtatcagccaaatcagtacttcaaattagctacatcggttataagacgcaggaaattcctgtcagtcagttgaaggcaggtgctgtcattaccttgaaggaagatacggaagtgatggacgaagtcgtggtaattggttacggtacgcagcgtaaaggtgatgtgaccagtgcgattgcttctgtaaaagcggaagactttacagtgggtaaggtaggcgatgcggccgatttgattaaaggtaaggtggctggtttgagtattgcaaaaggttctggtgacccgaatgcgacttctgccatccgtctgcgtggtgttatctccgtaaatggtagtacaactcctttgattctgatagatggagtggaaggagatttaagtacagtcgctcctgaaaatattgaagctatcgatgtgttgaaggatgcttctgccgcagctatctatggtacacgaggtgcaaacggtgtgattttgataactacaaaaaccggtaagcgtgaggcacatactactgcttcttattcgggctacgtttctgcttctcagtttggcaagaaactggattttatgactgcagaagatgtacgtgccgggaaaacaaactttacagacaaagggtatgatactgattggctggatgccatcagccgtaccggttttactcataatcacaactttaatatttctggaggtacaaaacagactacttattcagcagactttacttatcgtaaggaagacggtgtgattatgaatacgtatgcagaagatatccgtatgcgttttgatgtttctcactggatgctgaatgatatgttgaaggttaatttgaatatggtcaagaaatggcataagaatagtgcaaccaatgctacagccacagaccaatcaaatatctaccgtcaggcaattgcacgtaatccgacagctccgatttataacgaagatggttcttataatgaagatttcggggtaaactactactataatccggtaggaatgttggaagaacgtttgggtaattatacttacgaagagactcgtgctgctggtaatattacttttgaacccattaaaggatggcaaaccaatttgatgttagctaccagtcgttttggtgctcacgataaggggtataatacttctgattattatgggaaccaattgaaccaatggacaggatatgcttatcacacaaatagtgaaagctttcagaataatttggagcttacttctaaatatgatttgaatgtaggtaagcatcgtatgaatgcaatggtgggttatagttaccagtattacaaatatgaacaaaattatgctaataactataattttcccacagacttcttccaatggaataatttgggtataggtcaggctttgaaggaaggtaaagcaggaatgggcagtagtgccagtgaaaatactttaattggtttctttgcccgtgtaagttatgcctacgataatcgttataatttgttggtgagtgtacgtcgggaaggttcttccaagtttggagataacaataagtggggtacgttcccttctgcttcattaggatggactatcagtaatgaggagtttatgaaaggcattacttggttgaataacttgaaactgcgtgcaggttttggtattaccggtgtcattcctaataacccttatgaatctttaactaaatatacttacggaagttcttattattatagtgatggtaaatggttgccaggtttgtctgtaagctctaacccgaatccggatcttcgatgggaaaaatctacggaattcaatgtgggtttagattggagtgtattggatgatcgtttgggtggttctattgacttatataataagaaaactactgatttgttgttcttgtacacagtacctactcctccaaatttgtataatcagactttggctaatgcgggttctgtacgaaatcaaggtatcgaagttgctgtaaatgcagttccggtgcgtaccaaagactttgaatggaaaactgttgttacagtttctgctaataaaaataagttgttgagtttgtctaacgatatgtatgaatctaacagctttatggataccgggggactgggggaacctattagtatttctactcaccgtatggaagaaggtagagctttgggagaattttatggattgaaatctgttggtgtatccgagaatggtctgttcctgattgaaaaaccagatggagaggttgtagaattctctaatgatcagttgaaaaatgatgaatatcgtcagtacttgggtagcggtctgcctaaagtctatttgggatggacaaataatttgtcttataaaaactgggatttgagtatgcagtttaccagccaattgggattcaagattttgaatgagcctcgtgctttctatgaaaacaattctattgcatacaaccgattgaaatctgttgaggaagctccttatggtggacagtatacattgtcttcttctcagcctcagacttttgtaagttattatttggaagatggtgatttcttgaagttgacgaaccttactattggctatactttcccaataaagaagaacaataaatacatcaagggggtacgtgcttatttgtctggtgataacttgttctgtattactggttattctggattggatccagagttgtccaactggtatcctacttctgcaggtattgatgcgcgtgataaatatccatccattcgttcgtttacctttggtttgaacttaactttctaatattgaatcgatatgaaatcaaatttatataaatcattactcggaacagtaatcggtgcaagtatgctctcactgaatagctgtactgatttgagcgaaactatttatagtgagctggcatctgaaaagtacgaatttacagataaggatgctgctgccatgtttgctcctgtatattcttccttgcgtagcttgtattggggatggaatggttatgcagatgtgatggatgagacctctgatctgtggactactcctttgcgaattggagtgggatggggagatctttatattgctatgcatgagcacaatttccattcacagattgaccatttgtggactgaatggcaatatgcttatgaaggtattaatgcttgcaataaacttttggcggataaggctgtacaggagtcagaaacatcagttgcacaacttcgtgcttatcgtgcattgtattattacattttgtttgatttgttccgtaacattccattggatactacgtatgatcatccggctggctggcaacccgagcaagctaaaccgcaggaggtttgggattttctgattacggaactgaatgacattaaagataagtgcggtgatgaagtgagaatgggtgaaatcaataactatgcggtacacatgattcttgctaaaatgtatctgaatcataacgcatggtttaatgaccattcggatgattcttattatcagaaatgtattgatgaattaaatcaggtattagccggtccgttctcattggcaccgaattattcggataactttaaggaagatatttctacgtctccggaaattatttttggcataccatttgaatatttgtatgcaggtggtaactattatgctaataaatggatgaacgaagcagggcgtgcgacatggggatttaccggatgggctacaggcggaagtgcagctttgccacagttcctggaaacttatgatccggatgatacacgctttacagactgttggattgaaggtgaacagaaagatatgaatggtaatactatttatgtagatggtaaacctttgaactatacacgtgaaatccgtagtacagataatccgggctgttacccaatggaaggagcccgtctggtgaaatatgaaatcaagactggcgactggggtacttcttacgacgatgttcctttcttccgtctggcagacgctatgatgatgaaagccgaatgtctgttgcgcttgggtggatataatggcgaaaccgaagaagacgctgctcgtctggttacacaggtacgtgcacgtgctttcaaggataatccggaaaaagctacccgtacagtggctcagctgaaaggtggcagtgtgtacaaatatggtcatcgtgagaatacggccaaacaggatgaaccggacaactgggtaaccacagaagaaggtggtgatgacattatcttgggtggattgctggatgatctggcatgggagtttgtagcagaacatcatcgtcgccaggacttgattcgtttccgtatgacgaacggacagaatgtgttcaatggcaaatcttggttctgtaaagaccgtaaagaagatgtgaatgataatcattgtgatatcttcccgattcataagacattcctggaaggaaacttgaagttgaaacaaaatccgggttatggaggttaatgaaaacacttaaaaaagatttatcatgaaaaagaatatattattagcattttgttgctgttcgttgctcgcatttacagcatgtagtgacgattacaatgatgctacctcaaaacatgtttatggggaaaatgaaaacccttatttaaagattgacacagaagctcagatttctgctactggtgccttggaagtaaatggagaacattcatatacagtaaagctttcggactatgctgcaaagtttgaagaaaagatgggtatgagtgtagatgctgtgattgatggattgagcacaggcgaaactgttttctatccgattaatacgactcgtaatcagtggttaaagacgccatataacaaggacgatgccggttggtatttcaactcggcgaaccagccttgtgcgcaggatgatgaggcttgtaaagcatctgttgtattggataagaccaataaagagctggttttcgagttaacggaaggtggaattaccgctggtactgtgttggcattagaagttggatttgctaaaaacggcccggattatgataattatgtacgctttacgttgaatgccagtgtgacagacccgactgtagctgttgctactgtggcacttcctaatacaaattatacgtcggatgatattttgttgacctcaattgaagaaaatattgctgctgtgtttgaaatgacattggacgaatttattacagcatttgacgaaggtacaattaagttttatgcggcagacccaacaactggtgtatgggatacagaaagtgcttatacaggtgagcaacctgcaggatattggtttgatgaagctggtaaggtatgtgcttaccctggtgtagtatgtgctaattttaaacctgactctgatgaggtaagtaagagttgtgtaaaattatgttgcatgccagaaacgccagttggtaaacaatataattgtagttttggatttattgatactactgatgcaaccaaatttttccgtttcgttgttacttgtaatattacagaatagtataattagggaaagatggatattttaggagaatatccattcccttaaacaaaaacgtcctgatagaattgtcaggacgtttttatttatcgatttagtaatgaaaagttaagtctttatgtgttttaaatctgtgaaatatctggatagatctgtaactatgtgtttattgctttggttctgcttgctgtggagttgtagcgataaggttcctcaaaaagaggaggataaaaacattttacaggttatgtctgaagataatattgaggactttgataaatattacaagccggctgagtttgaagggatggatatgctccgaagtgatgccaaatggtcatggttccgctccaaacaaagtgagcatttcttcgtattctgggaagctggttttggtgatgaccctaatgcggaaacagttcctgccaatttgagagtagatatagatgacctcctggaaaaggcggaactattctatcggactaatgtggagaaactgaaatttactgaaactggacagggaaaatcatttttggaccgttataagatggaaatatatttgttgtatcaggaagaatggcttgccacaggttctggatacgacaatatcatcggggccttgtgggtaaacccgagtacatgtcagcctgtaggttctactattgcgcatgaaatcggacatagtttccagtatcaggtgtattgtgataagttatgccagggaggaaatgatgaccttaagtcgggtttccgctatggatatgaaggaagcaatggtggatgtggcttctgggagcagtgtgcgcagtggcaatcattccaggattatccggaggagatgtttacctcttataactttgacgtctggttgaataataatcatcgtcattttgaaaatgaatggatgcgttatgccagttattggttgcagtcttattggactatgaaacacggtattgagacaatcggtaatatttggagagagtctgtctatccggaggatgctatttcggcgtatacacggttgtattgcaatggcgactggagtaaaactaaaaaggaactgtatgattatgccagcaggatggcaacctttgatattgatgaagtacgtgagtattcagagggctacctcggacgttatcatactactttttattcaagtggtgaatattatcaggtggcttatgccaattgtccggaggctacaggctttaatgtgattcctttaaatgtgccagatgcgggcaatatggtagtagcggctgattttgtagggctggaacctggtgcaacactggcttcgggtgatccgggtgaatatatggaatcggaaactgtgaagggtacaaccacgaaatacaatacggcgggtagtgccggaaatatgggatggatgtatggttttgtagctttgaaacaagatggaagccgggagtatggtgaagcacattccgataagagcggacgtgtttccttcactgttccggctggtacacagagtttgtattttatagtgcaggctgcaccacagaattatgtagttcatccgtgggatgaaaaggagttgactgatgaacagttcccgtataaggtgaaatttgagaatacaaatttgttgggaaatattacaatcgacccggatgctgaacctcaggatttgacactgacgtataatgttacatttgcagcaagtgatgccgattataatggggcttctgtcagtgtttctgaaaatggagatcttacgaaaatagcacaggcgcttgctatgcaaccctcacaactgacttcgaacatgttatcagcaaaggctgagcctcaggaaggaaagattgcgtttgctgccgtgaagccggatggtagtttggattataatacgactgctaatggatatgggttctggtttgatagtcttggcaatcccattggatggggaagtgataatgacagtaaggtttatgtggaatatgacgcgaaaaattttagtttttcagtcggacaatatccgggaaaattagcttcgggtgataattatatcgtgaaagaagccttggtctatacaaagggcggacaacaatatgtaataactttagtctttaatattgatatcaaatgaacaaacgactaatagggacatgttttttagcggcagtttttactgccgctttttctcaatcggtatgtcccgttgatttatgtaacaataagttgagaggaaaggaaatttacattcccaaagacttgcaggggatggatcttcagaacccggaatctaaatggagctatcaccggatgtgctgtacggataatgtggtggtgttctgggaaaaaggtttcggcaacgatctggccaatcctcctcagttggaagggcatgacatgcatgtagatttgaataacctgacggataaactggaatacttctatacgtttttccgtgactctttacagttcacgaaaccgggttcgaaaagtgaccgctaccggatgatggtcatgattaattattcgctggaaggaacggcctacggaggtgattatgaccagcagattggtgcactatgggcggctcctaatcgtatacaggatgagaaattgaactgcgtggcacatgaattaggtcatagctttcaggcacagatttcgtgtgacggagaaggagaggcctggggtggttccggctttttcgaaatggcatcgcagtggatgttatggcaggtgaatccggactggcagacagatgaacgctatcactgggaagcttttacaaagttgacgcacaaggcctatctgcacttggagaatatttatcattcaccgtatattctggaatattggggaatgaagcgaggacgtccgattattgcagagcttttccgtcagggcaagagaggggaagacccggtgatgacttacaagcgcatgacgggattgtcgcaggaagctttctgtgatgagatgtttgatgcctgccggcatttgattaactgggattttgacagggtgtggaagaatacgcgtccttatgcgaacaagtacacttgcaagttgacagcccaatcggatggatggtatcaggtggccgccgaaaattgtccggagaattatggatttaatgccattccgctgagggtacctgaaccgggaacaaaggtggagttgcagtttgaaggagtaaatggaaagcaaggcggatatgtatcggtacatccggaaaaggccggttggcgatatgggtttgtagccgtcaaagccgatgggaagagtatatatggtgaaatgtctgccgataaaaaaggaaaactcacttttaaggtgcctgaaaacgagaagttagtatatttgtggttggtagtgatgggggcaccagaggagcattggatgaatccttcaccggaaagtggggaaaaagatgcacagtggccttatcgcatcagactgaaaggaacggatttaaagaactaattttattggggtatgtttgcaaaagaaacgtatgtcgctcgcaggcggcagttgaaggagagtgtaggctccggcttattgctctttttagggaatgacgagtgtggaatgaattatgaagacaacacgtataattatcggcaggattcttcattcctctatttctggggattgtcatacgctggtctggcggctgtaattgatattgacgaggaccgtgaaatcatttttggtgatgaactgaccattgaccatatcgtgtggatgggaacgcagccaactttacacgagaaggcacagcgagtaggagtgacggaaaccttgccactggctgaactgaagaagtacgtagagaaggtggtgtcacagaagcgtacggtgcattatcttccgccttatcgggcagaacatcgcctgaagctgatggacctgttaggggtaaagccgggagcagagatgccttctattccgtttatcaaagggattgtgaacctgcgaaattataagacggaagaagagattgcagagattgaacgtgcatgtgatatgacggctgaaatgcatctggaggcaatgcgtgtgctgcgtgtcgggatgaaggaacatgaggtggctgcggcattggaagcagtggctcaggcgcatggatgtaacttgtctttcccgaccattgctacggtatgcggacagactcttcataatcattatcatgggcatacggtaaaggaaggagatatgttgctggtggatgccggagctgagacggccatggggtatgcaggtgatatgtcttctactatctgtgcgggaaagaaatttaccagtcggcagaaggatatttatgatattcaggtggctgcgcatcaggcagcggtgaatgctttgaagcccggggtatatttccgtgatgtgtatgacttgtcctgtcgggtaatttgtgaaggcttgaaagggctgggactgatgaaaggaaatccggcagatgcggtagaacagggggcacatgccatgttcttcccttgtggactgggacacatgatgggactggatgtgcatgacatggaaaacctcggggaggtatgggttggctatgacggacagcctaaaagtacgcagttcgggcgtaagtcgttgcgcctggctcgtaagctggaaccgggttttgtgttgaccattgagccgggtatttattttattccggaactgatggattactggaaagcagagcatcgttttaccgatttcatcaattatgagaaactggaaagttatcgggactttacggggctgcgtaatgaggaggattacctgattacggctaccagagcacgaagactgggtaagaagattcctttgacaacggaagaagtggaggcaatgagatgacgaacgatagtaaagcgattgcgtgtgcctgtgtggcggtgttgagctggtcgacggtggccacggctttcaagatggccttgcgttatctgacgcatttcgagatgttgtgggtagccagcctgacttcactggtgatatttgcggtgttgctgactgcacagcggaaatggagattgcttgggaatctgacagggaaacaatggttgtattatgccggattgggactgctgaatccggtggcttattacttggtgctgttcaaggcatatgacttacttcctgcgcaggtggcgcagcctattaactatgcctggccgattgtgctgctgattttattggctttgtttgccggacaacctatacctaagaagaaatacatcggtatgtttgtttctttggcgggagtcgcattgatttcaatcggtaccggatttaacggagagatgagtgtatcgaccgaggggtttctattggcggcactgagtgccgtgttgtgggctacttactggatgctgaataaccgaaataaggtacagacggatggtagtgtggttttgtttttgactttcttatttggttcggtttatttgtcagtgggagctttgttctgtgggttgaacttgagctcgctgaccggtgtgttgtcgggcatgtacgtcggaggatttgaaatgggaattccttttattttctttggactggccatgcggaaaacttccaatccggcattgataaaccagttgtgttacctgtcgcccttcatgtcattgttcttcatttctgtcgtgctgggcgagcagattgtgtttactacttacatcggactggtgatgattgtgctgggtatcgtcttcaatcagtatttcgtaaaaagttccaatcaggcaaaaatcgtccaataggatgaaaaaatagtatagaatcgcctctcctgggtgcaggaggggcgattttgggataatattgttatcgtttcagacttcaatggtagagagttatccgtttatcttttttctttgcaattggaaaaatattctatgatatgaaaaatacatcgttaatcgtaagtgctgttttatggctttgcagctgtctttccatgatggcagccggaaataaagtatatgtggtgcagtcgcccgacaagcaggtgaaagtggaaatctctgcgggtacggacggacttatttattctgtatatcataaagactctcttattgttgttgatagtaaattagggttaattcaagaaggaaagacacctgctctggcgggtggggcgaaagtgatttctgccaaaattaaaaagatttttcaggacattgatgcacctttttatcgcttcaagtcgtttcaggcagtttgcaatgaaatgaacttgaagctgaaaggtgagtatggagtgtatttccgtgtctacaacgaaggagtggcttatcgtttttatacctcttccaaagaggatttgattatcaagaatgaaattgcggaattccggtttgccggtaattatacagcttatttgccgtactctacgaataaggaaaaaccgatggcaatggcttttcaaaatacgtatgaggtgaaaccgttgtcagaggctccacaggaactggcttttttgccggtaacagtggattgcaagcaggcgaaggtgacactgctggagtcggacttggaagcttatccgggaatgtttgtgcagccggatggaaagcaggcattgaaaggtgtgtttgctccttatccgaaaaagacggatttctatccatggcgcaagcaggagtatgtgacggaagcggagaattacattgcacgcgtaaaaggaaaccgtatgtatccgtggcgtatcttagctataacagaaaaggatacagaaatgccggtgaataatctggtatatgcgctggcttctcctaatcgcattggagactgttcctgggtaaagccgggtaaggtcgcctgggactggtggaatgactggaacctgaaaggtgtatctttcaaggcgggcatcaacatggatacatataagtattatattgattttgcttcccggaacgggttggaatatgtcgtattggatgaaggttggtatgacccgaagagcggggatatgctgacagtgattcctgaactggatttgccggaattgattcgatatggaaagagtaagggagtggagctggtactctggacggtgttcaatgtgctggattcacagttggatgaggcttgccggaagtatgctgaaatgggaatcaaaggctttaaggtggatttccttgaccgggatgaccagactgcggtggaaatgatttatcgtattgcagcaaaggcggcagaatataaactgatattggattatcacggtatctataagccaaccggtttgaatcgtacctatccgaatgtggtaaattatgaaagcgtgttcggtatggaagagatgaaatggagtgaggtggagaagaatatgccgctttatgatgtgactttcccgtacatccgtttgatggctggctatgtggactatacaccgggggctatgcgaaatttgtcgaaacgtgatttccagccgatgtattctagtccggccagcatggggacacgctgtcatcagttggctgcttatattgtgcacgattctccgtttacgatgctgtgtgatgcaccaacaaattatttgaaagagcaggaatgtgtggatttcatcagctcaattccggtggagacagattctacctttatttattcgggcaaactgggtgaatcgattgtgacagttcgcaaaaaagatattaactggtatattggagggatgacaaactgggatgagcgtgaggtgacactggatttttctttcttgggtgaaggagagaagtaccaatgtactttgttcaaggacggtgtcaatgcgtctcgccaggcagaagattatgtgaaggaaacttttgtggtagatgcacatacgaaactgcctatccatttagcttctggaggaggttttgccttgaaactggaacgtacttttgtaacggaagtgaaactttcggctgtgcctgcgggaaaaggaatcccttctttctataaaaaatacctggaagtagacggattatatattgtgtcatctgataaggtacgtgatgaggctttggaaaaggcgtatgagattgtatcgctgatgctggcgaagcgtccggatgttaaacagtacatggtgagcaaaggatgtcatgtgatgattatcggggagcacgaagaggtgtgtgatttgccggaatatgcgcatatctgtaacacaccggagaatatcgctttctggaataagcgtgccagaggttttggcggtgctccggaagatgacttttcggccagctgtggagaagagaatgtgttggctttcccgagtgacaagtatgtgggagaaaatatcctaattcatgagtttgcacatttgttccataccattggtattgtaggtgtagagcctgatttcaacgaccgtttggagaagtgcagacaaaatgccattgccaagggattgtggaaggatacgtatgctatttcaaataaagaagagtattttgcagaatgtgtgcagtcgttcttcaactgtaaccgctattcggagactccgaataaagtacacaatgccatgaaccgtcgtacgaaattgaaatcgtatgatcctgacatgtatcagttgctgaaagagtatttctatgaaattgaaattccgatattgaatgaagtgcacccataataaaaggaggaaaagaatgaaaaaacatgtattgacaagtttgttgttgggtacagttttgagtactgcttattcacaaaaggtggaatggaatactccaggtgcggggaatccgtttattccagggtattttgcagaccctacgataaagaagttcggagatacatattatgtctatgctacgactgatggcagtggggcaggatttggtccttcgcaggtatggtgtagcaaggattttgagaactggaccatcatgccgatgaactggccggacagccactggatttgggcaccggatgtaatgcagcataccgatggcacgtatcgtatgttttattgtcagccttgcaatgtatatgaaggagttgcagatacaccgcgtggaccatggaagaatgtactgggagaaagtgaagccgtactggttcccgaccgttttgtgaagaatgccattacgctggatggccagacgtttgtagacgatgacggctcggtatatttgtattggggtacatggggtatctataaaggttttggctgcggggctggaaagatgacgcctgatatgaaaggttttgtggaaacaaagttgattcctaatacggaagtaaaagatttctttgaggcgccgtttgtgatgaaacgaaatggtatctattattttatgtattcttccgattcgtgtcatgacagcacctatcatgtgcagtacgctacgagcacggtaggaccgcttggaccttatacatatagaggtacaatcctgaagacgtccgccgacggtacagtgcacggaccgggtcatcacagcattttgcaggaaggagacgattattatatcgtataccatcgtcatgataatcctcattccaaccgtggatttcatcgtcaggtttgtattgacaagctggagtttaatgccgatggttccatcgctcctgtagaaggaacacacagcggagtgggcgcttttgccaagagtgtattgaaatcgaaaaacctggcctatcggaaaccggtcaaagcttcttcgtattatgatgccaactttgtgcctgaatatgcggtagacgataataatggtacgttgtggcgtccgaagacaatggggcaggagtggattgagattgacttgcagaaggttgagaatatccgtacggtgtggacacaatttgaatatggcacgtcgtattatcagtatgtaattgagacttcagtagacggaaagaagtgggatgtttttgcggataagcgttccaattatctggctggaagtccgatggtagatttcggtgatgtgaaagcacggtatgtacgattaactacaacgggaacacagaaaaatggttttgccggtgctttgtggaatattaaagtgttcggcgagtttgaaacggcatctcctcagttgtggatgggactctcgggcttggactggaacggtacggagtggagaaacgacggcggtatgctgggcggtgtcttccaattgaaatccggacaagtttcccgtaagcgtattgacggacaggaggccattgtgttggccccaggtacatgcttggaatttatgtctccggttattaatccaaaagaggagcatacaactacagtctgggtgtatgaaaataaccgctgggtttcccaatcggcagacaagtatgtacaacggggaaaggtagttattcagtcacaggacaaggaactgacattgacaaatttccgttattataactggaaacaggaagaagtggaaaagacctacgatgcaactgtagggttggtacgtgtagaggcttctgataagatgaaaagaggattgctggtatctctggatgcagatgattttgcagtaggtgatacggtaggatatattccgaataagggagttgtagaaggttattttgagactcaaaaggctccggtaattgtagaagaacagcagggtaagaaagctttccgttttgaaggcgagcagttcttccgttccagctttaccttgccggctactcttcgtgacaatgctccttatacgttggaagcctgggtgctgaatccggaaatggctgagaatgaatgtgtggccgattttaccagctcgcacgatgaaatggaaaaaatcatgctggtgaatggcacagaacctcgttgcggaatgctgaaccattatggctggtacgaagatgtcggttataaggaggctaagtcactggaaggaaaatggcaacatatttatgtcgtttttgacggacgtatcgagaaggtatatataaacgggcagttaatcagttcaaaagatattcagctgctgattaaaccgatacaatttgtaactttgggacagaatgcagaaggtaactggccttttagcggctatctgcatgcgttgaagatctgggatgaggcacttcccttgaaagataaatgagaataataacctataaaatatgagtaacaccatgaaaaaatttgtgatttctgctctgcttttttcgttgataggaggtggggcatacgcgcagaagaaggcttctgcacacggctatccgattgatccggttccgtttacttcggtaaaactgacggattctttttggggacagcgtttgaaagccagccgtgaagtaactattccattggcttttagcaaatgtgaagaaaccggacgttacaagaactttgaaatggcagctcatccgagtgaaaataataaggtgacaggctattcatttgatgatacggatgtgtataagactattgaaggagccagctatctgcttcagacttatccggataagaagctgaaaaagtacattgacagtgtgctggtaattgtggctgctgcgcaggagcctgacggctatttgtacacttcacgtaccatgaatcctaagcatccacatgaatgggccggtagtaaacgctgggaaaaggtggaagaactgagccatgagttctataacttaggtcacatggtagaaggtgctattgcacactatcaggctacgggacaacggaattttctggatatagccattcgttatgcggactgtgtttgccgggagattggtgacaaaccgggacagcaggtacgtgtaccaggtcaccagattgcagaaatggcattggctaaactatatctggtaacgggcgatcagaaatacctggatcaggccaaattcttcctggataagcgcggctatacttctcgtcgggatgaatacagtcaggctcacaaaccggtaattgaacaggatgaggcagtaggacatgcagtacgtgcagcgtacatgtattctggtatggccgatgtggctgccctgacgggtgatacagcttatattcatgccatcgaccgtatctgggataacattgtttctaagaaattgtatatcaccggaggtattggtgcgacaaacaacggggaagctttcggaaagaattatgaacttcctaatatgtcggcttactgtgaaacttgtgcggctatcggtaatgtatatatgaattaccgtttgttcctcttgcacggagagtccaagtattacgatgtgctggaacgtactttgtacaatggattgatttcaggcgtatctttggatggtggtggtttcttctatccgaatccgttggagtctatgggacagcaccagcgtcagccttggttcggttgtgcttgttgtccgtctaatatctgtcgtttcatcccttctgttccgggctatgtttatgcagtaaaaggaaaagatgtatacgtaaacttgtttattgccaataatgctactttgcaggtaaacggaaagaaggttacactttcacaaaccacatcttatccatggaacggggatattacactggcagtagaccgtaattcagccggacagtttgccataaagattcgtattccgggatgggtacgcaatcaggtagttccgagtgacttgtatacttataccgatggtgtacgtccgaaatatagtgtgaaggtgaacggtgaagaagtgacatcagatttgcagaaaggttacctgaccatcgaccgtaaatggaaaaagggagataaggtagaagttcacttcgatatgaacgtgcgtacggtaagagcgaatggaaaggtggaagctgaccgtggccgggtttctgtagaacgtggtccgattgtgtattgtgcagaatggccggacaatgattttgatgtattgagtgtattgatgaaccgcactccgaagtttgaagtcgtagaaaaaccggatttgttgtatggtatcaatcagattaagactcaggctcagacattggaatacgatgaatcaggtcgtctggtcgcaaaagatcatacactgaccatgattccatattatgcatgggcacatcgtggagcgggaaatatggctgtgtggttgccgaatgaagtaagtgctactcgtccggttgctatcccgacactggcatcgaagagtaaggtagatgcttcacataaagtaaaatcactgtcttctatttctgacggactggtgccgaaagatgaaaatgaccgtacgattccgtattatcactggtggccgaaagaaggtactacagagtggatttcatacgaattcccggaagaaatggaagtttccagctctacagtgtattggtatgatgatgctccttggggaggttgccgtgtaccgaagtcttggaaaatctattataaagatgcttctggcaattggactccagttcagaatattacagcgtatggggtacagaagggcaatccgaataccgtagactttgaaccggtgaagacaaaggctgtgaagttggaagtggtacagccggataagaattcttcaggtttgtatgagtgggaagtgaaataaccatgagaattaatagataataatgcaatcagattcggggttttgggttttcttgggggtgactgaagagaatctgaaatcccgaattctttaatataatatgataaaatggaaaataacttattcaaatcaggcgttttgttatttgcattaggaagtatgtcttgtatctcactttgggcacaaggtacggtagaggattacaaccgtgcgtatgcgctgcgagagaaatacaatgccaagcacgtgctgtatgcaggtgtggttccgcattgggtagatcagacttctgctttctggtatgtacggcagacagaaaagggaaaggaatatgtgaaggtagatgctgcttcgaaaaaacgtacggcattgtttgaccagcagaaaatggcgtctgctttgacagaaaaagcaggacgtgagataaatgcttataaccttccgcttcagaattgccggttaaatatttcattggatacgttacgcttccaattggacgggaagttctgggcttacagcatcaaaaataaccgtttgttggatgaaggagcaataccttctcgtggaaaggaacgccactggatggaagtggacgatgagaaagaaggtagcccggttacctcaccggatggtaagtggaccgcttttatcaaaaatgacaacgtatatgttcgcgaagtggctacaggcaaagagaagcagctgagtcaggatggaacgttgagcaattattattcttcgtatatccagtggtcgcccgattccaagtcggtggtatcttgtcggattcgtccggtagaaaaacgttatgtatattatgtggaatcttctcctgccgatcaggcgcaacccaaattgcataagcaggaatatgcaaaacctggagacgagctgcgtttcaaggtgccttgtattttcgaagtagaatccggccgtcgtttgattccttctacggagctgttcagccatcagtatgaattgtctggtccgatgtggaatgcggatagtaaggccattactttcgaatacaatgaacgcgggcataaagtatatcgcgtgttggaaatgtcggcagtggatggcagtgtgcgtacgttgattgaagaaaaggaagaaaaatacgtgaactatcctcgcatttaccgtaactacctgagcgatggcaagcggattatctggtcaagtgagcgggataattacaaccatttgtatctctacgaccgggctaccggaaagcctttgaatcagattacgaaaggcgagtggtatgttcgtggagtgcagcatgtggatgaggccaatgaagtgatttacttttcggctaatggtatgaagaaaggcgaggacccgtacttgattcattattataaaatcaattttgatggaagtaacctggtggaactgactccggaagagggaatgcaccaatgctggtattcatccgactataagtatctggtagatgtgtatagcaaagtagaccaggctccgattgctgtgcttcgtgatgcaaagaacggaaaaatccgtatgcagctggataaagccgatatttctgctttgctggccaatggctggaaagccccggaagtattttctgccaaaggacgtgatggaaaaacggatatgtggggagtgatttatcgcccgtctaactttgatccgtcgaagaaatatccggtaattgaatacatttattccggaccgggcgaccagtatgtgccgaagactttctcttcttataactggtggatgacatcgctggctgaactgggattcattgtggtacaggtagatggtatgacgacctctttccgctcaaaagaatttgaagaagtttgttacaagaacctgaaagatgccggattgcccgaccatatagcctggattaaagccgctgcgcagaaatatccttatatggatattgaccgggtaggaattttcggttgctctgccggaggacaggagtctaccggggccgtgttgttccatccggaattctacaaggctgcctattcggcatgtggatgtcacgacaaccgtatggacaaaatctggtggaatgaactttggatgggatatccggtagatgaatcctacagtgcttgttccaatgtagacaatgctcatctgctgagtcgtccgttgatgctggtggtaggcgaactggacgataatgtagatccggcttctaccatgcaggtggccaatgctttgataaaagccaataaagattttgaactggtggttatcccgggagctcaccacacgatgggagaggactttggcgaacacaagcgttatgacttctttgtccgccatttgatgggagtcactcctccctcatgggataaagtgaagacaggaaaataacttgtggcaggtcaatgggtcattcatttttgtgaatcaggttcggaggaatcgttatgaaaaggaatggcccatttcttttttaaaagaaaagattatttttgtcattgatatgataaaataaagttgtacgccttaaaattaagtctaatgatagaacctgtttattctgctgctgaaaatcgttacgaatgtggtatgcagtatcgccgtgccggtcgtagtggagtgatgctgcccgctatttctttaggattatggcataattttggtgatgtagatacactttcacttagccggaaaaaattgcactatgcgtttgatcatggaattacacattttgacttggctaataattacggaccttcttatggctcagccgaagaaacctttgggcagattatgaagtcatcgttcgctccctatcgggatgagttgtttatttccacgaaggcaggtcatgacatgtggccaggcccgtatggcaactggggttccagaaaacatctgatggccagcctggaccagagcttgaagcggatgaatctggattatgtggatgtattttattctcatcggtatgacccggaaacgccgttggaagaaactcttcaggcattggttgatattgtgcgtaagggaaaggctttgtatgtcggcttgtctaaatacccgttggatgcctatctgtttgcatctcgttatctgaaagaacgggatgtgccttgcctactgtatcagggacggtatagcatgctggtacgcgaaccggaatctcaggggatattgaatgctgtgaaggagaatggaagtgggtttgtggctttttctcctttggcacaaggcttgctgactaaccgttatctgaacggtattccggataattctcgtatagcaaggggtggtttcctgaaaaaagaggcgcttacgccggaggtgttgagtaagatacaagcattgaatgaacgggcggctatgcgcggacagtcactggccgaaatggctctggcctggttgttgaaaaacgaaactgtgatttccgtgattgtaggggccagttcggtagaacagctgggagatagtttgaaaacgttgaatcatctttcatttgaagaagaggaacttcatgcaatcgaaaaaattctgatgtagccggctaacttcatgtgtgtaaggtgaaaagagaaatgaaaaaagtgaactgtctgtttgttaaaacaatataattataggcagctcactttttttgctatgaacattcatataaatttgttcccctgaaacacacttgtttttatatatggatgaaataatcattattatcgggttgatagtactgaacggtattttcgccatgtccgaggtggcattaatatcagcccgaaaatcccggttgtcgacagatgtaaaaaaagggaataaatctgctcgcgtagcattgaaactggcaggggacccagatcgttttctttctacagttcaaattggtattacattaattggtattttgaccggtatctattcgggaaataaaattgcggtcgacctgacgaatctgcttatctcatggggagttgcttcttcttatgcttttggactggcacagggaataattgtagtgatagtgacttatcttactattatttttggtgagctggtgcctaaacgtattggtatgagcatggccgagagaatggctaagctggtggcacggcctatgaatgtgctggcaaaagtggctttaccctttgtctggctgttatctaagagtacggaagcaatctttaatctgttgggcatcaaggataccgacagtaaagtgacagaagaggaaatcaagtctattattaaagaaggagcagacgatggagaagtacagcctgtagaacaggacattgtacagcgtgtattcttgttgggcgatttgaaagtaggctccattatgacgcataagagtgacattgtggcacttgagagtggaatgacggcggctgaagtgaaagctgtgctggtgaatgaattgtatgagttttatccggtgacggaagatggtgacttggataaggtgaaaggggtagtaaacctgaaggatttggtgttacatctttctgaagagaatttcaatttgccggctctgacgcatgaggctacattctttcatgaaaacatgaatgtgtataaggctttggagcagatgaaggcccagaagataagtcgtgccctggtttgtgatgagtttggagcttgcgtgggaattatcaccttgcgtgacattctggaaggcttagttggttctatggatgatgctggggaagaaccggatattatcaagcgaatcaataaagatggctggctggtagacggccagtgtccgttgtatgatttcttgtgctactttaatcgtcaggaccttttggaagatgtagactatcatacggtaggaggtttaattctgcagcatttacagcatattccacaaagtggagaaacactggagtggaataattttgtgctggaagtggtggatatggatggtgcgcgaattgataaagtcctggttaccattccttccgtagaaaatgaagaagaatgtgaattttagaatggaaaaagtttgatttattttaaaggagtttttcaggattaggtcttgaaaagctcctttaaatttataattatggatagaaaatggtttgaaagttcttttattttatatccggatttttctttactctgatttttgatatacgtacgataattttttaaatttggcacacgataaaccatagactttgtagtcgggaaatctaactatgttcaacttattcataaataatgcaagcataaaatgatgcgaaagttattttttatactatttatattattaatattgacgacaataaaatccaatgcacaatattttcagaatcttagtgtaggcaatgggctatctcagccttctgtaatggctataggacaggatactttggggcgaatgtggttcggtacaagagaaggtttaaatgtctatgacggaggtaagattaaatattacaagggtgaggtagataatgggaaagatgggaaattatggattggtaatagtatatcttccattgtatcagaaaatcttgtagatggcaataaagtgtattttatttctgatttctttttgtatgcttatgatgtgcaaaccgaactgttttgtaagatagataatagagggaaggtaacggctatgactgcatataaaggaaatattttgtatgcacagaggaacaacatatttttgtatgatctcaaaactcataaaaaaagcatttataaaattttacctgaatctacctctgttaatgtaattgaagttgacagagacaatatgtatgtaggtacgactgatggtataattatttctccttttggcgcactttgggaggagcagtaccttttaccgggagaagatatctatagaatatatgaagattcaaaacataatttgtggataggaacgagaatgaatggactttatcggagagtgaatgatagaatagagaaaattccactttgtccgaatggcataaacggtataattgacccgcagattcgtgaatttgttgaagacgatgatgggaatatatggtttggcacttttatgggtttacagaaatatgatataaaaaaccatacttatgcagccgtaaatattccgcagtatgcgggtgggcttaatcatccttctattttttcgcttttcaaagataggcaaggaaatatttgggctggaagttattttgggggcgtaaattatttcaacccaacaagaaatagtgtaattcattacgattatcaggcaaaggatttgtctagtctttattattcatacattggtgaaatgataatggacaaaagagggaatttgtggataagtacggatggaggaggagtcagttgtatagatcgtgggtggagaactgtggagcaatttactgccacgcctctttcacgtcatgggcttcctcataataatgtgaaaagtatgtgctatgatatggataatgatatgctatatataggtacacatcttggaggcttgtctcgatatgacattaagaagaagactttctataattattctacggattacaaatctcccgttatgccgggaagaattatacaccatgtcaaaaagtggaaaaataaaattgttgtttcctcaagagagggagtgtttttgctcgatactcggtcaaacagatttactcatttaccagattgttttggtgaagcaatgatttttgatatagataagaacggaactttttatactacatctggaaataatataaaagcaatttctcttgatactcctcataaacaggaaataatatcacttcatgctttaggagaggtgtcgcatattctttcagtagataaaaaactttatatttgtactttaggcagtggaatgattgtttatgatacctctttgaagacaattaatacctatacatcatataatagtaatcttcccagtaattattgttattcttcccgattgaccttaaatggtaaattgatacttataggagatagaggaataactatgtttgatacggataaaaagacgtttgcgagtataaagcaagattatttaaaagctcctattatatatggatgtggcatctgtatttctaaggaaaatataatttacgttggcgatacaaaggggataacacgtgttgaagagtctgattttttatctccgttacaacataaacaaccgatttatttttctaatattaatgtaaataacgctataatacatccatcggaggaaggaaaaatcctgaaaaaatctttggcattcacagatagaatagatttagcttcatcgcaaaataatataattatagagtttgctagttctgattatataaacaggcatgtacaacagatttttgaatataaattagaagggtttgataagacttggatttcgactacagttccttttgcgagatatacgaatctttctcctggaaattatacattgtgtgttagaatggcagatggtgatgcacaggatatggctgtacttaatatctgtatttcgttgccgtggtataacacatggtatgcatgggttttgtatatcattatatttattaccatcgtttggatgataatacgttatagaaaagagaaaaatgatttatttctttcacttgaaaaagagagatttgaaaagcagcatatagaagaacttaatcatgaaaaattggtgttttttaccaatgtaagtcatgagtttcgtactccacttaccttaataataagtcacatagaatctcttcttcagatgcccaatctacaaccaatggtgtataaccgggttttgaagcttaagagaagtgctcaatatatgaataacttgatttctgagcttttggattttagaaagtttacacaaaataaatatacgctgaatatgtcgcagaaagatatctgcctttttatgaaagagatattttatgtatttagtgattatgcacatagtaaaggacttaaatatgagtttttctccaatcaggaagtaatattatgctggtttgactcaaagcagttagagaaagtgtttcttaatttgttgtcgaatgcttttaaatatacggagagaggtagtattgagattaaaatatgcgtggaaggtgagaatgtggctatttcaatacatgatactggaaaaggtatagcaatgggtgattttaatcgtatttttgatcgtttttatcagattgaaggatcttctgagtctgctacatctccaggtactggaattggcttggctcttacgaagagtattgtagagaaacatcatggagaaatttgcttagatagtcagttgggaaagggtagtgtatttactgtaaaacttccacttggtgatgcaagatatattcatgatgagcatgttcattttgcggatcgggagaaggagtcagatttgaaggagacagatgaggatagtagagttggaatatgtgccgttgctaacgaagaaagtttccaaagcgaagaaggagagtcaaaaaaatatacggttttagttgtggaagataatgacgagcttattcaagtgttatgtgagcttttttcacctttttatcaggtaataatggcaagtaatggcaaggaaggattagataaagcatatgaatataagcctgatttaattatttcggatattatgatgcctgagatgtccggaacggaaatgtgtctgaaaataaagaacaatattgacttgtgtcatattcctattatacttcttactgcattaaatagtgtagaacagaatattgaaggccttaatagaggagcggatgattacatctcgaagccttttaatccgagaatcctacttgcaagagcaaataacttggttcgaaatagattgttaatacacaaccagatacgtaaaaatccaataacggaagttgatctgactagtattaatttgcttgatcaggagattttgaagaaaacttctgaggctattgaggcacatatggatgatacggaatttgatataccggaactttgtaaagagattggggtaggacgttctgttctgtattcaaaatttaaggccttaactggtatgactcctaataattttattctaaattacaggcttaagtttgctgctactatgttacagaagtatccggatataccagtttcagaagtgggtgataagtgtgggtttagttcgcctgtctattttagtaggtgttttaaaaatcagtatggagtaacccctcaaaattataggaaaagttctagaaataattctatggaaaaaggcgtctaatttttagacgcctttttccatagaaattatttttaccatccagggttttgtcctttagccaaatcaggatttttttcgcattcagacaatgggaatggccataagtaatctctttctgtcacaacacgtgtgtaataagcattgtataaggctattccatatacggggccatttaaagtttcaagaagtttccatcttttcatatcgctaaagctatgtccttcagcagcaagttctattgtacgttcgtggcgcaaacgttcaaaaacttcctcttttgtattggctgccatttgtggggtaccgttgttgatttcaggcatatttactccttttcttgtacgtactttattgatgtacttcactgcattgtctttgtcaaagccagattctgagaagatatagcactctgccagcattagatatacatctgccaggcgaataagtgggaagttaataggggtatctgcacggttgtttattgctccatccatatcatattctgctacaaatttccggaatggatagtattcatagtttccgttgacacgtatgaatccattggtctcgttgcagattccgacttcttttgtcatgacaaattctgtatctttagctttattgctgacccaacctttgaattgagtgtatggaagaatcaccgttgacgccattcttgggtcacgattttcatacatgcttaataattcagctctgtgtgttgtgtattcttttacacttttattgtcttcggtaagtttggagtagaagacttcttctcgcattgggtattcttttttctttgtttctgtattttcaacagcatcattataggttggatatccattccagccgtatgaggcttttgcttctgtccagctgaaaggtgatccatctttccattcataagaatctacaagattgaccgaggccattacattgttccagcagctaccaaatgcagctcttgttcccatgtagaaagtggttggcataccgaagtcctgtccaattccaccaatattctgtatggcaaaaatcatttcactactttcgtcaccaccaggtttgaacaggtctgaataagggttctcaccttcttcgtagagtttatacactcctgcatattgagaattttctgtttcaccaataagttctctgaagcatttcttggcttcatcatattcctcagcataaagaagtactttcccttttagtgcaagggcagctccggatgtggctcttcctttgttggtgctatcccattcgacaggcagtttctttattccttcttcaaggtctgtcaggataaattgtcttacagtttcaatgtcacttttgggtttgagcatgctcataaactcatcttctacaatggtagtttcatcgtagataggaactcctccccaaaaatccataagagtgaaataatataatgcacgcatgaacttggcttctgccttataccgctcttttaactcttctgtcatatcacatttgtctacattctgtaagacgatgttggcgcgagaaattccttcataaagtttctggaatttgtttgtaacaaatccttcgctactagtataggtgcctcttgcgatggtggcatatgaagctgggtcgtaaccgctgccaacacctcctaagcaatcaaaaccaaattgtcggccaaagacgtcttcgtctgtcatcaggctataaactcccatcatggcttggtcagcatgggcttgagtctggaagaaagtagtagaatttaattgatcttccggaaaaacatccaaatcataacatcctgtggtgaatgccattgaagcagctaaaactgcaattaatttatattttttcataatggtaaatcataaatggttataaaaactatgttagaaagatacgttaatacctactaccacatttttcatggtcggatatcccagtgttcctcctaattcagggtcaaatcctctaaaagaagtaaaggtgaagaagttttccaaacttccgtaaacacggatacgttcgagagaggttttggatacaattgatttaggtaaggtatatcctaactgaatattacgtatttttaagaatgaaagatcttgcagataaaaatcgctcatctgtttgtttttgttatttgaatattcaagtagtcttggatattcggcagatgtagttcttccttcataccatcttccttctacaacttctttattcatctgataaccataacgtacagaagccgtgttggctaaatcattttgccagtagatttttgctccagcctgaccttggaaaagaacagagaaatcaagccctttgtaagatgcatttaaattaagtccgaactggaacttaggattaggaccgtcgctcacaatttctctatcatccaagttaatcagtccgtctccattggtatctttgtataagaagtctcctttttctggcttacctgaagagaatatttgattttctgcaatgttgttaccatataattgttttgcgttgtctataatctgttgaacaagttgcaggtcttcatctgtttggatgatgcggtcaactctcaaaagatattgtgagttgatggaatggccttcccagataacgtttgcgccgtcaatactcataccacctttgtctcttcctttaaatttattgacaatattttttacataagtgaagtttccattgatgccgtatgagaagtcaccaatcttatcttgccatcctaaagtaaattcaactccttggttagttacaatagcactgttttgtttgggaatatcggttgaaccatgtaccaaaggagctggtagttcgataaggatatctttggtacgtttgtggaagtaatcaattgttccagtaaaacggttattgaagaacccaaagtcaactccgacatttgtcatataagttgattcccaggtaagtgccctgttggccaatttggtttgaacaagtccttgcactagcaggttgtttagtgaatagttactgttatcaattgcgtaagtagcaagcgcatcgtagttgcctacagaattgttccctaatgaaccgtatgaaaggcgaagttttaaattgctaagtcctttttctaatgctcctttcataaattcttcctgatcgattctccatgcaaaagaacctgaggggaaataccctgttcttttattagagaggaagcgtgaagactggtcagcgcgaaggtttaattcgagcagatatttgttgttccagtcaaggtttacacgtccgaagaaagatcgcatagcccattcagtacttgatccagatgcactggcgtctcctgtggctccatttatcacgtttagactatagtcgattaagtcatacttggtcgcttggaagttatgttggtaatatctttcctggctggcaccaatcattgcattcagccctaactgatcattgatgaaacggttttcatatctggctactacatcattgaaatagcgttgtgtttttccgtcgtagttcatgatgcttgatttaccttctgtggtacgtgtaatcagttcgtctctgaagttccattgttccaggatgacaggcttacgttttctttcttcatctacaacatcatatgaataagaacctgtgatgctgaatcctttgaatggttttaatgtagctacaaaacgagttctcaaattgtgttttgcaatgttaccggctacttggttaaggcgtactagtgggttattgacagcgctctgtgcatcgtcttctggattattcatcgcaccaaatcttccgtcgggtgcttgaaataccatgcctggagtagtggcagaagcgtatgtgaatacgtcatctacagaggttgatgtgcttgaggtatctgtatatttggccgcaggatccatgtttgatacatacccatttacgtatgctcctaaagttagccaaggtttgatatctgctgtaatgttgagtcgaccgctatatttttcaaaccctgtattatccatgactcccggattgttctgataaccaaatgaagaatagaatcttattttctcacttcctccactcattgaaattacatgattgtgtgatacagagttgttgaatgtatcatcaatccagtttgaatttggatagcgcaaggcatctttcccttcattgtctctccattcttgaatggtctgtgcagagaacttttcggccattcctgagtttctatatccttcattgatatattccatgtaatctgcataattggaaacaggatccatagaacttggaatagaaggagaggtaaatgatacataaccgttatagtcaagtttaattttacctgacttaccttgtttggtggttattaagatgacaccattggcagcacgtgaaccgtagatggcagaagatgctgcgtctttcaatactgtcattgtttcaatatcctgaggattgacggtattgatactggcttcagctccatctatgattacaagaggagaagaatcattaagtgttccttgaccgcgtactttgatggaggcgtcatcatttcctggctggttgcttgacatctggacactgacaccggctgcaagtcctgacaatgcatgagatacgtttgtgataggacggctttctgttaattcacttacattgatggtagagagagaacctgacaggtttacttttttctgagtaccataacctactactactacttcttccagtgtttccgtatcttctttaagatttacagtaatgttgttggtagtagaagtaacttttacttcttgtgtattaaatccaatataggaaacctgaagaatacactccgaaggaacatttagggtaaaatttccgtcaatgtcggtaatcgttccgttagttgttcctttcacaattacgttagctccaataataggctcacctgccgcatcaagaactttaccattaattgctttttgctgtaaaatactttcaattgcatctgcatgtggtgacgatgattcgttggctgcggtagctatgcctgatgcaaaaaaagctaaagaaactcctgccaaaattctggtcatggagattttgtagttcctagcacttttcataagtataagtttaagtttgtgaattattgacatagcaaagattgttagaatctgtaaattctattatacgaattgtccgatatatatgtaaaaaaaatccggagatttttttaggaatatttttatgtcaatataattgttagaataggtggtgcgtatcttattaatttataggtgattatatgaaattactgattgcgcagcttttaataactcgaagaaactgttttttcttgtataaaatagtgctggaagtgatctatacaatttgtgtatctactatgtacaatattgataccttgttatatgattaagccttaatattgcattgttaattaataatactaatatcatgaaaacaaaaagttttttttctttaattgtcttcgtttttctttcatgtattaaagtggctgcttatactgagagaaattttcttcaacatgtggcggctcaggaaagtcttgcggagtgccttgtcttaaatcaaaaatgggttcagtatccttcttataaagatcgggaaggatggagtcggtttttaggggaatataaagatgaaattattaaaaatggagagtcgcttttagggtacacttggaaagtggtaaaggcaacagactatctggagtttgaaagaagtggaaatcgggagattatggaacggccttttgatgacaacaatcaagctatcgtgaggcttatgcttgctgaactggcagaagggaggggacgttttatagaccagcttattaatggagtctttcatacttgtgaaatgacatcttgggcattgtcagcccatttggtgactcagcctacacaccgtgcattgcctacacccatttatcctttgattgatttaacagctggggatttgggaagtcttttatcatgggtatattattttatgcatgaagaatttgacaagatagatccggaaatttcccgacgcttatacagagaactggatgaaagaataatgaaaccttatttgaataatgatagtttttggtggctggctgcgaattataaagggcaaatggtgaataactggaatccatggtgcaatagtaattgtttgatgacatttatgctgctggagaatgatgtagaccgtctttctaaagctgtttcccgtagtatgcaatcggtggataagttccttaattatgttcactctgacggagcatgtgaagaaggaccttcttattgggggcatgcttcaggaaaatgtctcgattatcttgttttgttgaatcggataactggtggtaaaatctcaatatttgacaatccgcagattaaagcaatgggagagtatattgcaagaagttatgtagggaatggatgggttgttaattttgcggatgcttctgccaaaggaggtggagacccttatcttatataccgatatggaaaagctgtaaagagtgacatcttgaagcagtttgcttcaatgcaaaataagggaagcaagatttcttttagaggtcgtgatctgttccgtattttagaagcttttttagtggaggatgaattatgtgcgtatcaagaagcctatacaggtgtttcttatacctggtatcctgagacggaattttgctatgtaagaaataagaaggccttttttgccgcaaaaggaggatataatgatgaaagccataatcataatgatgcgggcagtttctctttgtgggtaaataatatgccggttattattgatgcgggagttggtacttacacaagacagacgtttagtagtgaaagatacacgatttggactatgcaaagtaattatcataatttgccgatgataaacggggttcctcaaaagtatggacgccagtataaggctacggaagttaaagctacgaagaatagtttctctgcgaacatagctacagcttatcctgatgaagctggagtgaagaaatggattcgttcttatacaatgaagtctgacgctcttatgataagtgaccggtttgaactgaatgagataaagaaagaaaatgtgattaatttcttgtcatggggagacataatcataaaagatggtgtaattgagatttctgtcaatggggttaaaggtacgttgaaatatgatactaagatgtttaaagtaaaaaaggaatgtgtaaaacttacggataaaaaattgtcgtctgtatggggagcggaggtctataggttgtcttttattgctaaagaaaaagagcaaaagggttgttatacttttacaatctctttttaagttaaacttaatgcgtgaaaatatttatgggtattttaaaattgttattaaattgttgtgtagcagcaactgtttgtgggttgggaagctgtatgaaaaaagcagaatcaactgaaaaatcctgggttgagcaggctgttgaaaatgctaggtgtcagattggattggagattgatacaattgaggcgagtggcaaggttttgaatcctgtgactttgaacgagaacgagcaagtttattattgtgggttctcagactggagaagtggttttttcccaggaagtgtgtggtatttgtatgaacttacggatgataatacgcttctttctgttgcacaaaagtatacggaggcgttggatgaggctaaaaaacttacttggcatcatgatatagggtttattgtgaattgtagttatggtaatgggcttaggttatcaggaaaggccgaatataaagatgtgatgatagaagcagctaactctttatgtacccgtttccgggaaaaacctggaactatacaaagttggaatgtttctggaaatagttggcaggctcaaagaggctgggaatgtccggttataattgataacatgatgaacctggaattgttgtttgaagcaacaaaactgtctggtgattctacttattataagattgccgtagcgcatgctgacagaacattgaaggaacagtttcgtccagatggaagttgttatcatgtcatagattacagtctttcagacgggagcgtaagacaccgtcatacagcacaaggatactctcatgaatctgtttggtcacgtggacaagcgtgggctatatatggttttacaatgtgttatcgttatacgggcgataaaaaatatttacagcaggccataaagacttttaatttcatgaagaaccataaaaagatgcctgaggaccttgttccttattgggacatggaagcacctaaaatacctgatgagcctagagatgtttcttctgcagctgttatagcttctgctttgtacgagatttgcacattgggagtgcctgaggcgatttcctatgaggaatatgctgaccatattatggcaagccttgcttcagagcgttacacagcaagattaggtgagaatgggcgatttattctgatgcattcagtgggaagtattcctcataacagcgaaatagatgttcctttgaattatgcagattattattatctggaagcattgaaacgaaaagtagacatagaaaaaagtaaaaaccttgcattaaaataaatgactatgatgaaaattaaaagtgtgcttttagtagcacttatgttagtatctgttcatgttgtcgcaaaaaatgataaagagtcacaggctagtgaccgggaagtttggaccgaactatgttataagatagcgcagcctatacttgaaaatatgagtaaaggtgaattgcagaagaacatgaatctggagcttagtccgacttgggatggaagagacaaacgagtggcttatatggaagcctttggacgcctgatggctggtatttcaccatggcttgctttgccagatgatgaaagtaaagaaggtagaatgagaaaacaactccgtgactgggctatatcatcgtataaaaatgcggtaaatcctgatagcccggactgcttgttgtgggaagggcccactcagatattggtagatgcggcttatattgcagaaagttttatgcgcgcacctgaagcaacttggaatagactggacccgataactaagcaaagatatatcgataggtttatcgggttgagagtgatacggccggcgtataataactggttgctttttagagccatgactgaggcctttcttttgtctataggcgaaaaggctgatatgtatgcactaactgtagccgtcaataagataaatgaatggtatctgagtgatggctggtatagtgatggaccggaatttgctttggattattataactcttatgtaatacatccgatgtatgtggaagtattagaggtttgtgaggctaataaattttcaactccagtttctgtttctttaggggttaaaagaatgcagcgctttaatactttcatagaaagacttatttctcctgaaggcacctatccggcatttggccgatctgtggtgtatcgtatgggggcatttcaatcaatggcgcttgccgcatggaaatatggtttgccagaggacctgaaaaatggacaaatccgaagtgcacttaccgcagtaatgaaaaatatgttttctgttgagggtaattttgataacgagaatttcttgaaacttggatttgtgggacaccagcctaatttggctaattattatacgaataatggaagtctttatatgacttctttagtctatttgccattgggacttcctgctaatcatccattttggtctgatccagctgaagattggacttcgagaaaagcatggaaaggtgaaagatttccgattgatggacacatttccctaagaagataatatctttaaataaaaaactctttggttttgtagaaaagtcaaagagtttttttattaaatgtgatggtcgtttgtatagtttcttcctttgaactatatgtttccgccgttcgaaccgtacgttttgcgttgcggagccgtaggtttttcgtaacggaaacgtaaaaagttccttttcgttcgtgtaaaaattccgttcctttttccgtattccattcgcagcttcaggctttgctgctatttttttcagtctttcgtgaaactttccctgcatccattcgcgcacacgtacgcgcacgcacgaattatataatgtagggtatttcacacggatttccacattgc

SEQ ID NO: 3758 - DNA, 29928 bp, Unknown
  gut microbiota DNA sequence
agatgcttttttcttcgtattcagtcctttctgttttttctctatttcctccagttttttctctatatccttgtaccgtggcatatgtaatttcaatcgcatttcatactcatcgttaaaaaggcaatgagtagagattctattggcagcctgataaattgtgttgtttatctgataaagatatttccattgttggtcatatttttcatctgtcaatctttctttttcatctgtcaatctatcttttacgattttcaattctatcttgcgtgtaatagtaggcatactctttttaattttaccaccgcaaatattgtaattataattgtaagtctcaaatccaactcaaataattttcagaatttcacaaattctcaaaattacccccataaaaaaatcccccatgcaaccgcatgagggattccacaagtaaattctatttcgagaaatttattttgctacacgttccaaccattttaccatgaacagcatgactcccattgaaatgaggcatacaatcatgaaaatagcccagcaatatccgataggaatggcgttatacataagagggccaatccacaacagaagattacctacagctgttgcaccaagccacaatccctggcaaagtcccaaaagatgctttggagccaccttcgaaacgaatgacaatccaagtggagagataaacaactcagctaccgtaagcaggaagtaaagaacaatcaacacccatgcaccggcttttacctgctggtcaataggaagttctcgatattctgcagcagaaggataacccataatgagtgaatatacagacaagaagagataagccaaacctgcgatgaacataccgatggcaatcttacgcggagtagaaatttccttgcctcttcttgaaagagaaccgaaaatcatcatgatgaccggagtcaatgtaatcacaaagaaaggattcactgcctgccatatttccggagcaattgtagatgtatcaacgaagtctctcgcaaagagtgaaagtgaagtaccgttctgatggaatgagaaccagaagaaaataaccacgccaagcactgcaaacaaggcgtaaagacgctgtttgatttccttagccatagcagccttttcttcagctgtataagtaacagctgctgctgcttcctttttccccggatttgggaactgactcttggtcacaaagaagataatcaaagaaataagcattgcggcaacagatgcaacaaatgaataatgaataccttcattaaatacctgcaaatactgtgcgcaagaagcagccatatcggaagtttcacccacacactgtgacatcagctggttcaagttacccatagcctcagccgacataccatctgcaccttttgctatatattcatggcatagagcaggaagaccagcattgtaaaccatattgtgtgcactcagccaccagcttctcaacaaaggagcgataaacggagcgataagtccaccaatattgataaatacataaaatatctggaatccagaatctctcttgctcttagcttcaatcagttccttttcccccttctttgcagcctctgcttcaaggtcatcgtacatctgacctacaatggcctgaagatttcccttgaacagaccattaccaaatgcgatgaagaacaaggcaatacaagtaagtgtaagcaaccatgatgtattacctgcattggcagtaataggaatagataatgcaatatatccaacagccatgaccacgagaccggccatgattgtacctttataattctgctttctgtcggctatcagcccccccacaagacttaacagataaatacctgcataaaagaatgaatagataagtgtacttttttcctcacttataccaaatttagaacaaagaaacaataccagtacggcattcatgatgtagtagccgaaacgctcccccatgttagaaagtgcagccggtatcagacctttaggatgcttgttaaacataaataatgaagattttaataattaatagtgttaatactcgtataaattctgtctctcgttcgcaaatatacaattattcaaataaatatgcaaacttacctcactcagcaccttgcggaagttttcccctgtatgtacggcttattacgcgttcaaagctatgaataatctcctgccccatgttcacacgcgtgctgtccactttccggatttccacaggcgtaactgcatctttatactttgccttgccgatacggattttcatcttgtccaggtttccggtaatgttcactcccgccttgaacggcaacggtgatttcagcacagagatgtgatagttaaagttcatatccaagccctgggttcctcccacagccgccttgtaacggtctatctgaagtaagaacgggtataccgtcacattgccgtcctgcacggtcaggttcaccgaaatactgtcgaacacattccgtttcttattcttgaacatcagcgtcttggatatttccgcaaaggtttctccatccatcagtaccagactgtcgcctttaatgtgcatggccgctttcagacttggaatcttcacgttcaggttggaatcaagcacagcctcggccgtagcatcaaaatcgaccattcccttgaaggaacggagcatcggcacaatcgtatcaagtgaaggaatgaaatcgaccaacttaccgatatttaccttgcgcaaacgaaaatcaaaaccggcatagcctcttgtttttctgcgggcacgatataccaacgtggtttccaggtctgcttccaatccccgcatggtcagctttttcagataaacggcctgattgcgaatgtctaccgctccttgcacattttcaaacaccatattcccgtaagtcaccttgttcaggttggtcttcaactcgaaatcaatattcttcggaatgacaaacaactgcatcggttctgccgacgataccgtgtcggtctctgcctgaagtgtatcctgcgggaagttcagtgcattaatcaactggttgcaatcgaggttgcgggaagcgatttccaggttggccttcagcatttttcctttcttcattgccgcatacaggccgtaaaccgatccgcttgccgtcaagttggaacgtccgatacgcatgctggcatttttcaaggtgataactctatcgcctaccgttacggctgttttgcgcattctcaccggcaaagccaattcaggggttcttaaagtcagtcggttgaatccgacaattcctttgggaagccatactgaatcgcgtaccttttcagccgtcaagttaaagcctcccttgtccatacccattttcatatcgcccatacggcaaaagagtgtatcggtctccaaggctacctttatattcggcatggccggattcagtttgcccggctgcaggtgcaaggaagcctttgcctttttactgaacaccttcaacgaatcgcccatctctcctttcagacgactcatctgcaatttacattccacgtcaatcagacgggtcgtatcctgcggattcgtagaccggacagtggcattcaattcatccaaatcggcagaaatagctgcagtacgcaaggaagccttgcgaatgttcatttgtgcggcaagattgtcttctccaatgaaacggagagcggcctggctggtaaattcaaaattcttcttggtatcgcgcaagaacatgtcctgcatatccagctttcctttcaaacggacacgcccccagtcctgcttctgaatagtcgacaagcgacaatgcaagcggaagtcggctcccacccgaccacctatcgacactccttcctgcaaggggaaagtcttggccagtgccgtaaggtctatttccgaacgggtatgaaaagtgatgtcagggtcacccaacaaatcttgcacttttccatcggccaatatatcggtgtgagctcccttgaaacggaatatcttcaaatcggcatacgagggctttcggcgcatgaaatcaacgtacccgctgaattccgccgtcaggtcgtcaataccgtaaggcaagtcggcatacttcgccgaggcctggttaatgctcatgtgaagtgtggcttccggcatctgctgtttgccataatgtcctttcaaggttccttctaacgtaacctcccctttggcagtaagttcctgacgcttcagcacactctccggaatcatattaaacacggtttccagcgacggggcatgcaacttataggtcaaatccaccgaagccggtccgccaatcgtatcccgtccgagagttcccgacaagtcaaaggctattccatttaatgtcaatcccgtatccttcagcgtaagccgtcgggaaacacggtccagttgcatatccgcattcagtcccacagccaagtgattcaccagtaactgtccgtcctgccagaagagcagattctcgttgtcatactccagtgccagcatggaataatctttcttcaaagaagctttcagattcatgttcaggttctgcacgcgggcgtatacccttgtatccctgtcgtcgaacgtcacgttcgtacgcttcaaggccacacggtttatgtctatttcctgaatctgaggcttctgcgatgtggtatcctcttctaccgtctcttccgtactctttacgatgtcccagttgctttttctttccttgttcttgaaggcatataccgacgcatcctccagtcccagataacgcaggctgattttatcatgcatcagataatccaccggattcaccactaccacacatttcttgaaagaaaccagtgaatcggtcttctgccataacgtatcattaatggctttggacaccaatactccatccgtcaccttcagtccgaatcgaggaaaggtggaaaagaaggtcagttccacgcttttcatctgcaaacgggcattcaatgactgattagccacattcaacaccaccggcgtcaacttttccggtgtaaaaataaaattcaccacgatagttacggccaacaagaatacagtcagtaacgctcctaacgaaatggccgtcagccgaattgttttacgtaatttcttgttcatcttttttctttcataaacaaactcatccgttgtttgttctacgagcctcggtattgaggcaataggtacagacaaactcaggatgtatcaggtaatgaatcaggaaacgggccttgtccgttttccggtacgattcacctgtaaacgttccggaggaagacaatttaaaaggacacactttcaagtgttgcaggaaatccacttctgccatatcgagcactttgtacatggtttccttggccgaccagtgcaaaagcaactgatacagttcttcacgcgactccatccgtgctctttccggcatctcgtcttccctcacaaaccgagactctacctttcgtacccgctcgccataagcctcaatatcaatgccgggctgagcagactcatgcagcccaactgccacatatcccttcgtatgagaaatggatacatgatactcccctcctgtcagaaacggctttcccgaaggctcatgtccaatccgtacttctttccccaacatcgttttcagtaacacacggactgccaggtattccattttccgggaaggagctttcagacgttcaagttcctgccacaccacgtcgtccgacagacaggcataaagttcctccagcgtttccgtcacctgccagattccccatcggccattttcctccgtccaagtcttcagcagtggcatagttatttctccttcacctcatcttcttcctgagccacaggcaagatggtcactttcaccttctggatacgacgcgaagtcatctccagaatctcaaagcggtaattctggtaattgataatctcatgcaacacggggaactctcccttcaactccagcagaaggccggccagtgaatccgcatcccctgagacatcttcaaatacctcctcactatccttgataatcttataaaagtccgacagcagagtctttccttcgaacacatacacgttttccgtcagtttcacgtacgtgcgttcttcctcatcgtattcgtcattgatttctccgacaatctcctcgatgatgtcttccatcgtcacgatgcccgacgtacctccaaactcatccaccactacggcgatgtgaatcttgttcgtctgaaagtcacgcagcaaatcgccaatcatcttattctcaggcacaaacaaggcagagcgaatcaggttctgccatttaaagtcctcacccttatccagataaggaagcaggtccttgatatacaatattcctttgatatggtcacgcgtttcttcatacaccggaatgcgtgaatatccgttttcattgatacacttcaatacctctgaaaaggtagaatgtatttccaaatccacaatatccagacgggaagtcattacttctttcgccgtttcttctccaaaacggatgattccctccagcatgttgttttcttccggtgtttcctgaatatccgtcaattccagcgcctgagaaagttcattgaccgacaggttccggactttccgtttctgtgaaaatcggttgataaagaaagaagaccggaccagcaatgaagaaataggccaaaacacagtacgcaaaaccgtcactacgggagctgccttacgggcaaagggtaaagtatgctgtgccgaataaattttcggcataatttctccgaacagcaacagcaggaaggtcaatacgaccgttacaatcaaaaactccagaatttttgcctctccaaaatcaatcacactggcaaacacatagttcaacagcatgataatcgtcacattgacaaagttattcgaaatcagaatagtggccagcagacgctctgaatcatcaagcaaggccttgattttagagtcataaggatgattctcctcctctatatcgttcaagtcagaaggagataacgaaaagaaagctatttcagaagcagaaacgaagcccgaagtatataataacgcaagggccaacagcaaagcaaaagcagcccctaacgaaaggggcattacggtaattccgtcacaaagctccgtccagcggagcaaacacgagtcagggtccattctatctacctgtagttaaacatcaatttaagaccgcctgagattaaaacggcaaatcatccgaaggactgttctcaggctgagcagcagcggcaaccggcgaagcagcctgtggttgtgcaggggcagtaggttgtgcagcacgcggagtcagcatttccatattgtcaccgaaaatttccgtcacataacgtttcactccattctggtcgtcgtatgaacgagtacggattttcccttcaatatacagcttatcgcctttgtgcacatacttttcggctgtttcagccagtccgcgccacaacacgatgttatgccattccgtacgttcaggcacctgtgtaccattggccagcgtataagcacggtctgtagtagccagcgggaaagtagccacagctactccactgtccaaatatcttacttcagggtctttccctacatttccaatcaattgtactttattcaatgacatgattttattttttataatttggtttcaaaagtaacgaaaaaaaacgagatatcaagcgcgacacggggaatttatgcaaatcgtcaatcagaacgcgctgaaattcagaaagaacagcatcttcctcttccaattccacttcgtagcatcgggcatggattacccggtgtgacaacacgtgtttcacctcaggcgataccacgcggaacatacgtatggagcggttacctaccagttcccggaatgccggaagagagaaaatctcttcttctcctacttcctgttccgtttcaatcagcggaaactcatacagattctgccagatgtctccggcttcacgcctttttataaatgtatgcacgcctgcacgcacgtaaatataagaaaaataacgatctaataccttcgttttacgtgctttccagggaagtttatccaccaaattcttttgcagggccacacaactgtctgaaagcggacaaaacagacaggaaggcgacgacggcacacattgcaaggccccgaaatccatgatggcctgattatacaatgccggacgcgacttgtccatcatttcatcggctagcgaagcatacagttttttccctgctcctgtatcaatgggttcttccacgcccagccaccgagacaatacgcgatacacattcccgtcgaccaccgcatacggcatgtcgtaagcaaaggaacaaatggctgcggccgtatagtctcccacccctttcaatgcccttacatcttcataacgcacggggaaagctcctttttcggcaatcgtacgcgcagctgcgtgcaagttacgggcacgcgaataatagcccagcccctgccagcacttcatcacttcgtcttctgaagcctttgccagtgtttctacatccgggaaatgctccatgaaacggcagtaatagtcatatccctgcaccacacgggtctgctgaagaatgatttccgaaatccatatcttataagggtctttagtgtcacgccaaggcaggtcacgcttgttctccttgtaccagtcaattattgtagtcgcaaacaaattcatccaatctataatttggctgcaaaaataatacatttgcccgacatatacagaaaaaccacgtcatacagctgtataaaagactcgtaactctcaaaaaagcacgagttttctaaaaaaatattcccgagaaattttcgaaagatacagaaaagctatatatttgcagtccaaaaatttaagataacgtataacaataattattagcgcaatgactaaagcagatattgtaaacgaaattgccaagaacacaggtattgacaaggcaacagtattagcaacccttgaggcgttcatgggatcagtaaaagaatctttgtcgaaagatgagaatgtctacctccgtggtttcggtagtttcattgtaaagaaaagagcgcagaaaactgctcgtaatatttctaagaacactaccattattattccggaacacaatattccggcatttaaaccagcaaaaacatttactctatcagtaaaaaaataattaacatttagtattaacccataaaattttgaagctatgccaagcggaaagaaaagaaaaagacataaaatgtctacacacaaacgtaaaaaaagactaagaaagaacagacataaaagcaaaaaataattgttagtctgtccgacttcaataaagaacaaacttgcaaagctcaacaaaagcctttcaggtttgttctttgtgtaattagcaacctagtaaaaacaaaaaaccaagtaacaaagtgacaagcgaattagtagtagacgtacagcccaaggaaatttctatcgccctcatggaggacaagaacctggtagagttccagaaagaggaacgaaacctctccttttccgtaggcaacatgtacgtaggtaaagtccggaaactcatgcccggcctcaacgcctgcttcgtagacgtaggctttgagaaagacgcttttcttcactacctggacttgggaccacaatttcattcttaccagaagtacctcaagcaagtaatcagcgaccggaaaaagctctatcccatgtcgaaagcttccatgctgcccgacattgaaaaggatggaaccatttccagcgtgctccaacagggacaggaagtcatcgtacagattgtcaaggaaccgatttccaccaaggggccgcgactgacctgcgaattgtcgttcgccggacgctatctggtactgatacctttcaacgacaaagtatccgtttcacaaaaaataaaatccagcgaggaaagagcacgcctcaaacaactgctgcagagcatcaagcctaagaacttcggagtcatcgtacgtaccgtggccgaaggaaagcgcgtggcagaactggatgcggaactgaaagtcctgctgaaacattgggaagaaaccatcacgaaagtacagaaggccaccaaactgccctcactggtttatgaggaaacaagccgtaccgtagccatgctgcgcgacttgttcaacccgtcgtacgaaaacatctatgtgaacgacgaaaccgttttcaacgaagtaaaagattatgtagcactcattgcccccgagcgtacgggtatcgtgaagcgctacaccggccagctccctattttcgataacttcggcatcaccaagcaaatcaaatcctctttcgggaaaaccgtttcctacaagagcggagcttacctgattatcgagcatacggaagcactccatgtggtggacgtaaacagcggaaaccgttccaaatcaactaacggacaagaagcgaatgcactcgacgtaaatttgggcgcagccgatgagttggcacgccagcttcgtctaagggatatgggaggtatcattgtggtagacttcatcgatatgaacctggctgaaaaccggcagaaactttacgaacgcatgtgccagaacatgcagaaagaccgggccaagcacaacatccttcctctgagcaaattcggacttatgcaaatcacgcgccagcgtgtgcgtccggccatggatgtcactactgatgaggactgcccagtatgtttcggaaaaggaaaaatcaaaccttctatcctgtttaccgatacattggaaagtaagattgactatatggtcaacaagctgaaagtgaagaaattcacactacacattcatccttatgtcgctgcctacgtaaatcagggactcatgtccatgaagcgcaaatggcagatgaaatatggatttggcatcaaaatcgttccgaaccagaacctggcgttcctgcaatataaattctttgacgtgaacaaccaggaaatggacatgaaggaagaattcgaaattaaataatctgaaggccgtctcccaccgcaaaacaagggagacggccttttttgtctccaaaggcaaagccccttccccctctctttcctgattgaaaaacgtacaggaaataaacgagctaccgtgccacacgatttatgtttctctccgcagaaacctacgttttccacaagagaaacataaggttccgcaccgggaaacataggtttcgcggcagggaaacataattacaacaaaggctttcggagcactccgcactgatgttttctcttattccaccccagcacgttacacaccggaattctgtttttatcctttatgcccttgtcgatttcctcctttttttactacctttgcagaaaggtatcattttaatataaaatcatgaaaatacgtagcattttattcgttattggggttacattctctcagttttcactggcacaacagactttgccgcgcgatccggactgctgtaccagtatcatggtagggaaactggcctcaaccgacggctctgtcatgacgagccacacctgcgacagctggtaccgtacgtgggtaaacgtagtaccggcagcagactttgccaacgacactgtgatgaacatttacgacggacgcatgcacacggaatcggtcaacgaccagacaaaactgaccgtaaaaggacagattccgcaagccaaacatacctacgcttttctggatacggcttatccgtgcctgaatgagaagcagctggccatgggagaaactaccatcagcggacgggataccctgcggaaccctaaaggaatgttcatgattgaagaactggcccgcgtggcattgcaacgctgcaccacggctcgcgatgccattcagctcatgggtaagctggtgaaggaatacggctacggcgattcgggcgaatgtctgaccattgccgacccgaaggaagtatggcactttgaaattttcggcgaaggtcccgaccagattggcggtgtatgggctgccgtacgtatccccgatgatgaagtgggcgtatcggccaatatctcacgtatcagcacactcaacctgaaggatacacgtaactatatggcatctgaaaacgtgttcagcgtagccaagaaactcaagctgtgggatggcaaggaaccgttcaagttctggaaagcctacggggggccgaactatttcggcaagatgcaggcattcagcatccgcgagttcttcattctgagcacactggctccttcgctcaagcttagcatggacgatgaggaactgccgctgagtgtaaaaccggaaaagaaaatcagcaatgccgacgtgatggcttacctgcgccagacgtatgaaggtacggaatggagcgtaacgaaaaacctgaaagtggctgtcaaggacagaaaaaccggaaagactgataccattaccagcccgcgtgccaacccgtggatgcgtactgacgaggtacaactgttcaatgccctgcaaaagggtgccgtgacagccaaccgcaacgtggccgtgccgcaatgtgcgtactctaccgtcatccagttgcgcgactggcttccggatgccgtgggaggtgtctgctggtttggcatggacaaccccggacagagtccgcgcgtgcccatcttctgcggcacgaccgacctgcctgaaatgttcaagatttgcggcaaccaccgctaccgcctggatgctgccttgtggcactatcgccaggccaacaagctggctaccgtgagatggggaaatgcccggaagattttggaaaagaacctgctccattttgaaagaaaaggagtggaagaactgacgatggtggaacagcgctatgccgaactgctcaagagtcagggagaagaagctgccaaggcttatctgaccgactacaccaaagactttatcggagctacccttctgcgctgggacgaaatgaccgccaaatactggaatgactaccgcttcggattctgattcctcatttatacacacgtaaaaaacacatagaaaagatatgaaaacagttacatttatctctgcattacttcttgcttcggccaccgttcaggcacagcccaaggccgaaggctaccagtttactaccgtagtcaaccagaaagtgactccggtcaagaaccaggctgctaccggtacttgctggtgctttgccactacctctttcatcgaagccgaactcctgcgtcagggaaaaggtgaattcgacctctcggaaatgtacattgtccgccagaaatatatgaaccagttgaacgacaactacctgcgccacgggaatggtaacatcggtcagggaagtatctcacccagctggtttacggctttcactcaggtaggcatcgtgccggaagaagtatacagcggcatcaactacaattctcctacacacaaccacaaggagctggcctcttatatggaagccattgccggaaaagccgtacagatgcgccagcgcagtccggaatacgacaagcttatcaagagcctgttcgacatctacatgggcgaactgcctgaaaagtttacctacaaaggcaaggaatacaccccgcagtccttcgcacagagcctggacatccatcccgaagactacgtcatgctgaccagctttacccacaagccctactaccaggtatttgaagtagagattcccgacaactgggaacatgccaagatgtacaaccttccgctggacgaaatgatggaagctacagactatgcactgaaaaacggctataccgtatgctgggacggagacgtcagcgaaaaaggtttctctttcaagcacggagtagccatcaatccggaaaccggaaagacagaagacctgaaggatactgactttgcccgctggcaaggtatggatgcacaggaaagactcaacgaagccttcaagtttgaatatccttgtccggaagtcaaggtaactcccgaaatccgccagaaaggatacgaatcttttgtgacaaccgatgaccacctgatgcacctcaccggcattgccaaggaccagaacggcacgaagtactacatcaccaagaactcttggggaaccgaccgcaatgacttcggcggttacctgaacatgtcggaaagctacgtacgtgccaagactatctacgtgcttgtatacaaggatgccctgagcaaggacatgaagaaaaagctcggactggccgactaaaaaacctgcctgaaaaacaaccaggttaccaaaatggatgcttatctttgctgctgtcaacagataagcatccattttttatgaaaactgaagactatagtcccattttagaatcagccggcattcgtcccacctctacccgactgctcatctatgaagccattgcccgtaacagtgacacattcagcctgagcacgttggaaaggcaactcgacagcatcgacaagtcggtcatcttccgcaccctcgtgctctttcacgagcaccacctgatacacagtgtagacgacggcagcggctcacacaaatactgcatctgccacaaccatggacactgccacgaagaagaggcccactgccacttctattgtgaaatctgccagaacacctactgcctgaacgaagacctgataccgcacatcgacctgcccaagggcttcaccgcccgaaaagtcaactacatcgtaaagggtatctgcgccaagtgcgctgccaagcactccgtttaaggccgtttttttgatttacatcaataaaacaccgaaaaatcaaaatttcatgttataaaacatatattctattcgaaaaagccctatctttgcagcgtaatcaagaacgaaagttcaacggttaccaggaaaaaagattgttataggatttaaaaagattgtttttacctcgtcgggatgacgacgtatttttggattaggttttagattttaaggtattaaagttttttattcactaaaaagaaagggtaacaacatgaaaacgatgaagaatttcattcagaaggtcttcaagggagacccgatgatttggggttacgtaatgctcagctaatgagtgtgtaacccctttgcagaccggggatgttcggtctttttgacagaaagttgtaaagtttactgtatacaatacctttcagaggtatcataaaaaaacgagtgtatccgcttcgatgcactcgtttttttgtattgatagccaaagtcctgcaaaatagttcttcacataagatgatattgaaagaaagttcctgaatctgtcacaaattattgccagttccgaatcttttcaataactttcctgcaaatttccaaaaacgatacagaaatgtcattaatcagagttattctctccattatttttccgcctcttgccgtaattgataaaggctgtggctcagtactgattgtcttcattctcaccctgtgcggatggattccgggagttatcggagctttaataatcttgaacaagcaagaataaatctaattcaattactaaataagaaatcaccatgaaagaattacatgtacatgaaattacaggacattcgcttgtcccggcaaaagacattccggcattgctcgatgaaaaccatattgaatttcaggctatcgattgtgtaaactggaaggactatccttaccgtcctgaagtggaattccgcatcgctcacacgggagatgccattttgctgaactaccgcgtcaaggaagaaagcgtacgtgccgtagcagcagaagataacggcagagtatgggaagactcctgctgtgaattcttcttccagcttcccgaagaccaggaagaaaatatctactacaactttgaatgcaactgtggaggaaccttgctcatcggcggtggaagaccgggcgacagacctcatgcaccagtggaaatcatccgaaaagtagaccgctggacctcgctcgacaaagctccttttgaagaacgtatgggagaatgcggctggcagctggccctttgcatcccgaaggaagcattcttccgtcatcagcttaaaggtttcaaaggaatgactgctcatgccaatttctacaaatgcggcgacttgcagcacaccccgcacttcctgtcatggaacaaaatagacttgccgaagccctgcttccactgtccggaattcttcggtaagattatgtttgaataagaaattgcaccaataaaaaacaagaacaaatgtacttgactgttttcctctcagggtatgaatacaaaaatgaatataagtatgagagagaaaagaggaaaagcagtcaagtaacattcgcctgcaaacacaatagaaactaaaaaaagagaactaaatatgctgtcctccacccagcgcctgatacaagttgataaggctttgtatctccttgaaacagttagcggtttgagagagctgggcagttaacaacgtctgccgggcagtcagcacttccagataggtcgtgttgccatgctgcatcagcagtgacgtactggtgaaggccttttccagggcagccacctgattttcgtaattatcttttttccttttgcttatctgataagacaccagcgcttcgttcacttccgtaccggcatccagcaacttttgctcaaaagccagaagagcctcttcctgctgtgccttggcaatgcgccggcaggcaatcaatgtccctctgttaaacagcggctgcgtcagtgaagccagtgctgaggtaacaaacttacccggattggtaatcagtccacccaccgaatttgtccatccggcgcttccacttaaggttatggacggataaaaggctgaattagcctgattggtcacataaaacgcttgttccaggtcacgttcggccatacgcacgtccggacggttggaaagcatctgaagtggaactcccacagacaaacgtgaagtgaattgttgaccggaaagttttcctctcgcaatcttatgcggcgtctctgccagcagcaaagacagactgttttccacctggttaatctgttcttccaaatccatcaccgagttctctacttcataataagtagctctcatctgtgaaacggctgcctcatcggcctgtcccgcatccatcagggcctgcgtagactccacggtttccttccacgtatcggccgtttgacgggaaatctccagttgctcatcgagcatcaataacgtgtaatatgtattcgcaatattggctatcaggctggagtatactgcctgcttataatcttcactttgcagataagcagatttagcctgacgcttggcattacgtagtttcccgaaaatgtccagttcccaactggccgtcaccggaagcgtataggtgtgtgaagccttgctaccttccaccgtattgatacctccttgcggagaaagagcaaaggaaggaagaaaagccagtttggccgaaagcaaagaagctttcgcttcttccacacgcagactggctgtctgcacatctgtattctgcgccagccccttttcaatcagatcctgcaaataagggtctgtaaagaaatcccgccagtgaatgtttccgatacttgccgtatcggaaactgtgacctcttcatcgtacaagttctcgggaaccgaggtttgcggttcatagctggtatatattccgcaactgctcagcaagagcgttgcgccacatgcgattatctttgatgtattcatattgttcatttacttttctgtgttaaaggcacttttctcaatcaaggtctgttccttctcatatagaatctgctggtcgggttccttctgcatagggccacgcaatttttcctgaaggtattcgaacaccacaaagaaaaccggaaccacaaagagcagggccaacgtaccaatcagcatacctcctactacacccgtggccaatgaactgtttccgttcgctccggcaccggatgagaacatcaacggaagcataccaaaaatcatacacaagacggtcatgataatagggcggaaacgggcctgagctgccgaataagcagaagagataatacccatacccttacgacggcgttcaatggcatattctgtaatcaagatggctgttttagccagcaaaccaatcaacatgatggcaccagtctgaagatagatgttgttctccaaccctgccacacgggcaaacaggaagcttcccatcaatccgaaaggaacggacagaattactgccagcggcaccaggaaactttcatacaagcaggaaagaatcaggtaaatcaataccacacagagggtatagatgaacacggtctgtgctcctccgctgctggcttcctcacgtgccatacctccatattcataaccgtagccagaaggaagtacctgtgctgcaacctccttaatggctttctgaacttcaccggtagaatatccctcggccacgttcacattcacatcaatcgtattatacaagttgaaacgtttggcaatttccggacctaagacagaacgcagtgtcacaaactggctgaccggtgccatctccgttccattacgcacaaacatgttgtccagcgcatgctgattcaaacgggcatcgggtgaagcctgaatcatgacacggtatacctttccatacttattgtaattagatacgtacgaacctccacaataggctcccaccacatcgagcacatcactcggactgattccggcacgcttgcatttagctgcatctacatccaccgcaatctgagggaagttcatggcgtatgaactataggccattgccacttccggacgttcgttaagggtcataataaatttttgtacggactcatagaacggctgcatgtcgcctcccgttttatcctccatataaagttccaccgcattaccggtaccgtatcccggaatcatggcaggctggaaacagaatacctgcgcctcctttatctcgctgaactgagcattcaagcgcttcatgacagcttccaccgaatgttccttaccttttcgttcatcccagtgatacaagcggatgatgactgtaccatatgacgtaccctgcccggaaatcaatccgtatcccgtaatacgcgaataatgctctatctctggagtagctttcaatatatcctgcaccttgtccatcaccttattagtttcagccaaagagttaccaggtgaggtactgatattaatcatcatggttccctggtcttcctgaggcaccagtccggtcttggtagtcgacatcagatataccagcaatacagtggcaacacccagtgaagcccatacagtccaccgatgatggaagaagaacatcagtcctttcttatatttgcccagcatcgtattaaatgacacggtgtaagccgcacggatacgaccgctgaagctcttgatacttttctccgtgtcagaagctttcatcatcatggcgcataaagccggacagagcgtcaaggcattaatacaggagagtcctacagccaccgccatcgtaataccaaactgagtgtagaataccccagaagttcctcccatgaaagtcaccggaataaatacagccatgaagacaaaggtacacgacacaacggccatcgtcacatcactcatggcatcctttgtggcaagataagacgagcgataccccacatcaaatttagcttgtacggcttccactacaataatcgcatcatccaccacggtaccgatggccagcacaagggcaaacaaggtcaggatattgatactgaatccggccaccgacaggaaggcaaacgtaccaatcagtgacacaatgatggaaatggaaggaatcaaggtactcttgaagtcatgcaagaagaagtaaaccaccaacactaccaggataatagctatcaccagggtttcaaccacattgtcgatagaagcaaaaaggaagtcgttcacactcatcatctgaataaactccgttccctccggaagatcttttgaaatatcatccagcaagtcggagatttcctggtttacagccgtagcattggcaccagccacctggaagaccatgaaagtaactcccggaactccatctgcttcgccatggaaactataggattcacgtcccagttctacctccgcaatatcttttacccgaagcacggacccgtctttctgcgaacgtatgaccatgttttcaaattcttctacgctcttcagacgacctttgtacttcatggtgtactgaaacacattgtccgaactttcacccaatgagcccgtaggtgcttccgtattctgctcacccaatacggctgtcacatcagaaggaaccagtccgtattgtgccattttgtcgggtttcatccagatacgcatactgtaagtatctcccatcagctgcacgtcgcctacgccctgaatacgttttacctggggaatcacattgatgtcaaggtaattggccaggaaggtttcatcataacgcctgtcggggctgataagactgttaatctgaaggaagctgttctggcgtttcatggtgctgacgccaatagcggttacttcggaaggcagcagaccttgtgcggcagacacacggttctgcacattcaccgctgccatatccgggtcggtaccctgcttgaaatataccaggatttcggctgtacccgcattggtagccgtagaggtaatgtatatcatgttttctaccccgttgatactttcttccagcggcatgatgacactgttcatcaccgcatcggcattggcaccagtataagtggcttccacgcgtacggtaggcggagcaatgtcaggatattgttccatgggaagtgtataaagtgatataaatcccactatcagaatcagaaccgatatggagagggccatcaccggccgcttaatgaatatatttcctttcataatcgtctgttattttacttgcgttccttcacgaatcattccggctccgtcggccacaatctcatctccagctttcagtccatccagcacaatgtattctttcccatcgttgaccggagctacttttattaaagtagataccgcttttccgtctaccaccttataagccagaatcttatcctgcaactgtacggtagctccctgcggaatcacaatacatttcttatagacacttggaatcagcacgttacccgatgccccactgtgcagcaaacgggaagcattcggaaataccgcacgtacacctaccgtacccgtctccttgtcaatcacgccactgacagattctatctttcccttttcttcgtacacagagccatcgttcaactgaagctgaatggccggcatattttctactgccttatcaatcgtaccgtattgacgtgccaaagccaaaagctgattttcagtcatcgagaaatagacatacatggtgtcattatctgacacagtggtcagcggttgcgacatattggaactgaccagtgctcctacccggtaaggcaacatgccaatcaccccgttgctggggctttttacttccgtataagaaaggttattccgcgcatttacctcctgtgccttagcctgtgccagctgtgccttggcagtcagatactcattctcagttgtctgcaagttaaagctggagactaccttcttggcgtacagttcctttgtacttttatacgtaagttcagctgtagccagactggctttcgctacttccacattggcaactgccgtttccaaagccgccttataaggaacctggtcaatcacaaacaagacttctccctgtcgtacgacatctccttcggatacattcaacttttcaatatatcctgacacttgcggataaatgtcaatgtcctgcataccttcaatagaggcagaatacgaagtcatgatttccttatccgtatctgctgtaagcgttacaagattatagcctttctgagtgttttctttggtttccgtcttacaggaagttatccccatcgcacagctaactagcaacatcagccatacgtttaattttccaatctttttcgtcatattcgtttctttttttgttcgcgcaaaagtagcaagcaagggaaaaaggaaggcaaccgattttcgcacagagatgttcaattttctccacccttccgtcaaaatcatgaaatatggaaaataagacattcttgagagaaaataagacatagcaccttgaccaaaaatcttcatctttgcaaaaaagaattatggaagagattattagacatattcacatagaaatgcttcaggcacattgcgatgcccaaagccatattgacgattacatgtttctgaccgaacgcctggagaatgtgttcccggaaaaccggaatgtcaaactggaagtttttctgatgctctattgtgaggaaggagaagtaaaattggaactgaacaacgtggcccgacacttacaggccaacgacctgctgattagcctgcccaatactattataggtcaggtaatggccagtcccaaccataaggtaaaagtattctgtttctccaaccgctttatccaacggctgacccagactcagaaatatagctggaagtcgatatgttacatacaggaaaaccccatcaagcattttggagaaaaccggaatgaaacgtttcaccagtacctgaaactgatagaggacaagatacagactccacccgacaaataccagaaagagattctgctgcacattgcttcagcattttatggcgagatggtggccgaaaccacccgcaagtctattgaaaaagaaaagcaaggatatcacactcctgtcaaacaacccgacttcatcttcaagcaattcatggaagcgctgacagccgacaacggtaaacaccgtacattgacttattatgccgacttattctgttactcgccgaagtatctgtcgcgcatcgtcaagcaaatcagcgggaaaaatgcattgacattgattcatgagaatgccattgaacatatcattccggagctgagacattccaacaaaagtattaaggaaatttctgtggattttgaattccccaatgtgtcgttttttgcacaatatgtaaaaaaatacttaggaatgacacctacggaatatcgcaacagcagtcaagagaaaaaatagcaaaacaaatatatatcaacccaaaagcaacagcaaatccacgctgttgcttttttattttcatacgttatcctttttataatcaaacaaatacgtacccttattctcaaaaattaaagcatcaagaaaaaattgcctgaacaaaaacggaaatattacgtttaaaagcatgaataggcaaaaacattaacgagataaacaaactaaactataaaacgactaattagttattttttcgacggaaaaagttatagggttggtttaatagattgtaatcaacgagaaaacaacaacaaaatgagaaaacttacttttattgcatttttatgcactttgctattggtttcttgtaaccaggaagaacaattagacacatcgtctactacaaacaaatccgggattttattcaaattacaaaaggatggatatgagggaagtacttcacgtatctctggaaaggaaacctctccatacgatgagttgcactatttcattgtggatgaaaacggtgaaaaggtcaaaaatatcaagagctattatgaagcctctacgtccacaatttataccgaaggactgcacaaaggaaattaccgtctgctggttttaggaatccagggcgatgccaccaaagataaagccaccgttcatactcctgagcgtatacaagatgagtggctggcatttccggaagatttgcagaaaccactggaggctgaatatttctattcgcaaactcctttctcagtcatagaggtacagactgccgacggaatacaggaaacggcttcaattacagatgaaataacccaaaaacggattgtaagccgggttgatttcgatttcacctaccataatccttacgtacgcaatgcggtaacagataaaagtctgtcattcggtgacgtacggttttataccactctctcgggcagcggagaactgagcggtgaaagcaacggcaccctcgacccgatttccttgaatgagcagacttcctacctcttcatgccgctgtgtgggaatgcgcacctcaacggtgaaatcacaatttccactcgcaactaccgcaaggaggaaaggcgtcaggtgtatggattcgagcatcaatcactaagcagcaatcacattcatcacatagaatcggtagtaactcatccggatgacaaggatatagtgatgttcatcacacctgcagcatacaatgcaggcggacataaagccatcctgcaggacgatgaaacaaaagaagtgtacaccaatccgtcactccggaagttcaatacttcacaaccgcttcaggtgtcggttaccgaagaaggaaaactgcacgcacgtttttactctccccgtaatctgagtaacgtactgataaaaatgcagttgccgcaagtaagcaatgagtatttcgacctggcctattttgattcaattccggcattctgcgatttttatgaagagattccattgatagaacgttcagtaatgtgccgcacggaatcaggaaaagtgattgaaataagcaagaaaacggctgccgaactttcgaatgctgtactgaaaatagaatcggatgacccgttttgggccaagctgcaggatatcaagcatggatggaatatttactggggcctgtatggcggagatccggaaagagaagacggtggtccggtaggtaactggatgggaatacgcccggtgcattgccgtgagtcggtagccctcttcctgaacttcacctatatgattgacatgccggaacacgaacagattctgcgtgataatgccgaccagctgtacgatgacaacaaacagcccgtaaaggtggaagcggtattgcaacagatgcggatggccaagacccttcaggtgggattggtctacccaggaaacggagtcattggtttaggaggtggaagtacctttggatgttaccagcaaggatggtttgaacactactttaatacctactcgtgcagcatcatgttccatgagctgggacacgtaatgggatacggacacaacagttcgtttacttatggaccatgggcagaaaaattgatgaacaatttttatgtcaacaacatccaggatatgcctatcaactccaaaaactatttgaacagtgcccaaaaccctcaccgatacaaataaacaaacgaaattaaatctgatgaaaaaatgaatatgaaatatatacttacgctggcaagcgcaggcttgtttttactaagtggctgtctgcaggaagattttcagcagtcacccgactcaggcggaattttaaccgtcaacttttccagaactggaatgacaaatgaaacagacacaaacactgatgagcaaatacatacactcaatgcctaccgttttgaaaacggaatactgaaggaatcattcaaatccttacaagtaaacgatgaaggaatgtgcaagcttgaccttgagcagataaagggaaacatctattttctggccaatggtgaaagcgtgatttcaaaggctaatctgacagacgatgtcacaactctggacgagtttctgaacttgaccgccacttcagaagaaatggcatcagaatatatgttaatgaacggaatggccgatttgagttcaggtaacacctctttctctgtagctttaaagcgtgcggtagcccgtatcgacctggagtcttcatttcaagatgcagaagtaaaccgcatcgtaataaaagaagtagctctgacaggtttagtacatgaagccggtaaccaaagcgtactgacggacctggaaaaaaacgagttgacaaaagacttcggagagcatccgtttaaaaacggaaaggaatctctttactaccttccggaacaaacatccaacggtcatgaggtggaaattatgatgaccgccaatggaggatggcataggttaagaactaccctgccggcgttgaaacgtaacacggtgtacacgctgagagtgtatggaaacggtgcaaacctgaacgtggaagtactgacggataactgggaaagcggtgactcatccgcatcaggtcttacactcaaaggactggtcgataaagagaattcacaactgtcagaaggagtaaccatcaacgagcgtggtgacaccgtattcgttccttgctgggaaagtaatttccagctgactttggcagccgaaacaggagccgaagtcagcatctttggaggagctgaaggagtcacagtcactccagccactcgctccagagaactttctcccgttgcacagattaatgtcgccagcagacagaaaatgccgggcagcaaacatgaatacgtatatctggatgttcacaaagaccaggtacaaaccggtagagtggtactggtattcacgcctaatccgatagaattgagcggacttatccagtttgacgaaaatggagaatgtgacttcaaccgatacgtggacggagaactggcccgcctgattttgccggaaggaaaaaccgccacactgagattcggagaagaagaagcacaatggatgaaactcactgatgaaggtaacaatacctatcgtctgttaggaggatggaaacccaatgacccgaaagcagacggaagagagcaggccggcgaattaatcattacagataaagacggcagccatccggagacttataccatccgacgcctcaactggggattgccggtagttaatgtcaacggtacatggtggtgcaagtacaacctgagaggtaacgtgaagaatttcaacgatcagattctgattaattcagaccctgccaaagacagcagtctggcagactacctgacttcctgctctgacgatgaattcctgcacattctgggcgaccagtatcaggccggaaatcctgaagggttacaacttactcatgatgactcttcattctattacgaaggatacaaaagccagacgaacaacttcgggactctgtctcctaccgtcatggcacccgacggttaccagattccggacttcgatgactaccgtttctttacaggaagcacgaatttcaatctgggttacttcaaccccggtgccttcaacaatggtttaggccagcgactcaactttaaggtcgtagaacgtaatgcgactttccagggattgcagtacggtccggttaccttctatgattttgaatacgaaggcagccactggacaatctgcggcttaggtcaccaatgggatgcaaccagcatatcaaagatgatgattttgctggcgacctatggaaatggaggaagcacctggatgatagaaggttattcaaacagtgaaggcagaggaaactggttcaagtatacaggcaacaatgcacagaaaacccgtactatccgatgcatcaagacaccggtggaatacatctacgagtaaaaaaacaacaatatctaaacagacaaataaaccagtataatatgtacatcaaaaaatacatacagtttttcggcatactttctgccctattatttacaacagcctgtggaggagaagatatccccagcggaggagaaggaggaggtacaggagacggaggaagcagcacacctgtccgaactatcactactcacatcaatgagttccaggtggaaggagaaaactcctctcttcccggtgaaggtgagataaaagagctgcaggcctgcctgttcgaagacggtgcgatgacggaaatctatacccagttcactcagaaagacggccagtatatgtttcagacagacaaacagacaggtcatctctacatattggccaacattgccgaccagatcaatgtgcaggaactgaaagcacaaggcatcaccgaagatgaatggcaacagattacgtttgcacatgctgaagactacatacatgcaccggaatttttctctggcatgattgacttaggacagactgctgagaatgcgctccacctccacctggaaagaggtatcgcccgttttgacctttccatccggaccaccagctccatcaaggtgaaaaaggtcgtgctcaagaacatgacgcaccacactttcctgtttccgcaaaatccggtcaccataccgactgatgcgggtgtaaaagaccgttcgattgagtttccacaatggctggaaacgaatacccaaggcatcgcctacgtgtacgagcagtctggagaagatttaaaggcgagcatggaaatcgtgaagaatgggaaagagactactttggaatctacccttccatctactttgaaacgaaacgtagtgtacacattagagattactacggattctgctacgggagaagccaaactgaacatcgttgaatggaaaaacggaggcgaccataccctttcttccggcatgggcaacttaaaagtagatacccagacgtctattcttcctgagaatgtggtgataaatgaggaaaagacacaggtaacccttcctcatacagctacagagatgacattggccatcgactgtgatgatgaactggaactcattccagggaatatgccgataaagattgaatcactgggaggtactcgtccggaaacgataggaaagaacctgttccgtattcagaaagaacaatggagacctggcgttgcaggccaagaactgaagctcagattccaccggaaaggactgcttcacaattatgaggaagacgctctgacattagtcttatctgaaaacccaattaaactggaagggctcatccacttccatgacggctatgaatttgacttcggacgctacattgacaatgaattgggactcatcactctgccggagtctaaaaaactgacggtggaatacgaaagtggtgaaggtcactggattaagctggaggagcaggatgaaacacccaactcattccgcatcataggaggctggaaacccaatgacccaacggccaacggacgcaagcagaaagctacactggtaatctgcaataccgacggtacggacagagaagaatacacggtcgtacgccgcaactggggactccctgttacctacctcaacggtgtatggtggtgcaaatacaatgccatgggagattcaaagaatttcagcgaccagatactttcttctaacgacccggctgccaaggcaggaaagacgctttttgattacctgcgcgactgtactcctgaagagttcttcaaactatggaagtggcagtatcagggaaaaaccacgcagggtatggaagtgattgacgacggtggagtggctaaactgaaaggatacggtccatccagcgctcatatcaacagactggatgccaccgccatggcacccgacggctacgaacttccttccatggagaattttgaaagagtcttaaactcaaccagtggaaccatctggttgatgtgggacggaagccataccacggcatggaacggaggctcaaacattcagcgtcgccaaagaagaagaaacgatgttaccgtaggaagcgtagcgctgtctgacctgatttacattcagatgtacaataatgcagaacagcaatacgaaccactcgtatggtacggtcccggagcacaatgggatgacagtggcatcaaacatggacactacaatgccatgttatgggctacccactcgcccagcaacggacaaggatggttttataacggaacaatggcagggctttatcccaacaagaacggtgcaggatcaaacgacacccgacttcttcgctttaagaaatcggacgtagaatacattgtagtgtactaaataagttgacacaatttatttagtaacatgcgtaaaaatcgaaagtattcaaaggcagaatgtctgtctt

SEQ ID NO: 3759 - DNA, 198999 bp, Unknown
  gut microbiota DNA sequence
acctttttaggaatataatgtttaacctgtcaactttgtcaggaattaatcttcaaactgacaactattttcagtacacttcagtttcaaaccaaacgtccttgtgttttaactcaaacgcacttgcgtttgaatcaaaatgcttaggcgttttttcactaatgcctaagcgtttttctaaaggctattttttactatacttattagcacatccggtcgcgataatcctcgtaatggaaggtgcgatatacttccagttctccaccagcatggagcagggctatcgaagggtgatgaatgccgttgaacatatttgtcttgaccatcgtataatgaatcatgtcttcaaatacgatccgctctcctacctgcagttcgtggtcaaacttccagctgcccatataatcgccactcaggcaactgtttcctcccaagcggtagacatggtcttcccgagtcgccgttttcaccgcctcagccggaagagattcggcattacgcacccgcggctgataaggcatctccagacagtcgggcatgtggcaggtaaagctcacatccagaatggctgtccgtatcccccggctttctactacatctaccaccgatgccaccagcggaccagtctgccaggtgaaagccgaaccgggttccagaataatctgcagatgcggatagcgtgatttcaatccctgcaacaagcgaatcaaatagtctacgtcataatcggcacgtgtcatcaggtgacctccacccagattcaaccatttcaactgaggaaaccagcgactgaatttttcctcgatatgctggagcgtgcgttccagctcgtaggaattcgactcacaatgacaatgacagtggaaaccttcaataccttcgggcaactgctccggaagcaggtcggccgttacaccgaaacgtgtacccggcgcacaagggttatagagctctacttccacctccgaatattcgggattgacacggatgccgcatgacacatgctccggataagcctttgccatcggataaaaacgctcaaactgcgacaaggagttgaatgtgatgtgactgctgtacttcaggaatgcaggaaagttctgcgcggtataggccggcgaataagtatgcgccttgctgccgaactcttcgaaagccaaccgtgcttcgtattccgaactggccgtggtgtaacggatgtattcccgaaaaatagggaacgacttccacatggcaaaggctttaaatgccagaataatttccactcccgccgtatcggccacatgcttaatcagcgtcaggttctttctcaataaatcttcttccatgacatagcatggagaaggtatcttatcccagtcttttatcattctttttctctgttatttagtgtttgaatcaattatcttaaaacgggcaaatttcagcagcaactgtttcacgccggcgtgctggaactgtacggtggctttgcagttgtctccgttgccttccacccgagtcacttcccctttgccgaagcgttcatgctctatccacatgccggcagaaagtccccctgccgacggaccggccggagctgccgaaggactcgcatcaggtatacggcgaagcgtacgaggaggtacaaaacgatgaggttcttccggcatcggtccgccatcaaacatagacggccccgtttcgcggggttcgcgttcgtaagatgcacggctggcttctttccggaagcggctggccttttcttcgatgcgcgtacccatcagttcctcctgcggcacctgcaggtaacgcacgtcaatatctttcaagaaacggcttggattacagaactccatctttccgtatttgaaacggctcttggcgtatgacaaatagcagtggtcttcagcccgtgtcactgccacataaaacagacggcgctcttcctcgagtgcccgataggaagcagatgacagcggactcgggaacagattttcttccagtcccaccacaaacacattcggaaactccagccccttggcggagtgaatggtcatcagtgtcaccttcggctgtgcttctccctgctcttcatcctgatcggtcagcaaggcaatctctgaaagataatccgacaaaagcacatgtgggcttccttcttcctgacggccgtcgcagaaatcgcgcataccgttcaccagttcctctatattttcctgacggctcatgttctccggcgaacggtcctgataaatctcagccatgattcccgaacgtttcaccagttccatacccaacgtataggcatcctgctcacgagccaaagtaacgaattccgaaatcaggtcgcggaatccctgcaacttggtataggttcctttattcagttccactccgtagctcagcggttcgcaaagcactttccacaaactcacctcacaacgtccggctgcttcggtcaacttacccaatgtggtattcccaattcctcgtgccggatagttgatgacacgcttgaaagcctcttcatcgtgcggattcaccgccaggcggaaataggccaccacatccttcacttctttccgctgataaaacgagagtcctccataaatacggtaaggtatgctgcgcttgcgcaatgcctcctcaaaaatacggctctgtgcattcgtacggtaaaggatggcaaaatcatgataggcatatcccgacttggcatgcagctgcgcaatcttgttggtcacgatttctccttcttccacgtcgctataagctgcaaacacgccgataggttcccccttgtctttctcggagaacacctccttctgaatctggtcgcggtttttcgcaatcaggctgttcgccgcattcacgatggtctgcgtggagcggtaattctgctccaacttaaacaaccgtgcatctttgtatgtacgggtaaaattcaggatattatcaatgttggctccacggaaagaatagatactctgggcatcatcacctaccacacacacaaactggtgtttctgcgtaagctggagtacgatgctgtgctgtgcaaaattcgtatcctgatactcatctactaagatgtaacggaaacgcgccgcatatttatcacatatatccggacgagtgcggaacaacaaataggtgtacagcagcaggtcgtcaaagtccatcgcgtcactctgccggcagcggttccagtaacgcaggtagatttcatgcaacagaggcaccttcgcagcccggtcagcttctatgagttcggcatttgccgcgtatgcctccggcaacaccaggtgattcttggcattgctgatgcggccctgcaccatccccggcttgtaaaccttatcgtccaggttcatttcttttatgatagttttcaccagacttttggaatccgtcgcatcgtaaattgtaaaattaggagtaaaacccagcgcctcagcctcggcccgcaatatccgtgaaaaaatagaatggaaagtccccatccaaagataacgggcacgttcctgccctacctgacgggcaatacgctccttcatttcacgagcggccttattggtaaaggtcaaggccagaatggaccacggctcataaccgttgtccagcaaataggctatcttgtatgtcagcacgcgggtctttccggaaccggctccggcaatcaccagcgaaggaccttcgttgtacaataccgcctcgcgctgactttcattcagttcattcaaatagtctgtcatacaggtcaaaataaatccgccacaaagatagcacaaatccgtcagtgtcctaacacttttttcgactctccccttaaacaattttcccctttgaggtgttatagtagttggtacagtaaaacaattaccatcgtattaaggttataaagaaagggaggcttaccgactgtcaaatccggcaaagcctccctctttttttatttatgtatccgtaaaatcagttcttgaaactgtgaatcggagcaggaattcgtccaccacggttcacaaaagcttcacagctgaaacggttgaccggcattaccggtgcatagcccagcaatccaccaaactctaccgtatcgcccacttcctttcctactaccggaatgattctcactgccgtcgttttctggttaaccataccaatggccgattcatcggcaatcattcctgaaatggttgctgctgaagtactacccggaatggcaatcatatccagccctacagagcatacacacgtcatggcttccagtttttcaatggtcaaggccccagccacaaccgcatcaatcattccctggtcttcactgaccggaataaacgcaccactcagtccgcccacgtaagaagaagccattacaccacccttcttcacctggtcgttcaacagggctaaggcagccgttgttcccggtgcacccggatattccaatccgatttcctgaagaatctctgccacactgtcacctactgccggagttggagccaacgaaaggtcgatgataccaaacggcacattcaaacggcgagaagcttcctgtgccaccagctgccccacacgcgtaatcttgaacgccgtgcgcttgatggtttcacaaagcacttcaaagcttttgccacgaatctgttccagggcatatttcaccacacccggaccgctgacacccacgttgataacggcatccggttctgaaacgccatggaaagcaccggccataaacggattgtcatccggagcattacaaagcaccaccaatttggcacaacctaatgagtcacgttctttcgtcatttccgccgtttccttaatgatttcacccatcaatttcactgcatccatgttgatgccggtcttggtagagcctacatttattgaactacagatacgttccgtacaagccaaagccttcggaatagaacgaatcagtaactcatcgctacggctcatacctttcgacacaatagccgaatatcctccgataaagtttacgcccaattctcctgcagccttatccagcgtcttggcaatcagcacgtaatcatccggagtcttacaagccgttcctcccaccaatgcaataggcgtaatcgagatacgcttgtttacgataggaattccaaattccttggaaatgtcctcacccgtctgcaccagattctttgccagaccggtaatcttgttatatatattctgacaaagcacctccaggttactgtccgcacaatccagcaggttgatccccatggtaatggtacgcacatccaggttctcctgttctatcatcttgttggtttcaagaacctcagttatattaatcataccgtttcccgtttttattagatacgatgcattttgtcaaagatttcttcacgctggcatttgatctgtaccccaatgcctgaaccgatattcgtcagttcgctcaccacctgttcaaaaggtttttccagcttggtcatatccacaatcatcatcattgtgaaatactcctgcacgatggtctgcgaaatatccagaatattcactttattttctgccagataggtacacacctgagcaatgatacctaccgtatccttacccaccactgtaataatagctttgttcaccattgtttctaaaataaattgttgtttatgccccacaaaggtagacatttcttcccatgtgttaccttttcatgagaattattttcaagaaagttgtgtttccacaaaaaacatgacactttgtaggcgctatctcgatttctttacaagccttttgcctttgcttcgttccagatggcatccatctcttccagcgacatatccttcagattcttcccctccttaatggtatgcgcttccaagtaattaaaacgacggataaacttctggtttgttcgctccagtgcattgtccggattgattttatacaagcgggccgcattaatcaggctgaacattacatcaccaaattcggcctctgccttttctttgtccatatgaccgacctcagcttcaaactcgcctatctcttcctttaccttgctccatacttgctcacgctcttcccagtcaaaccctacattgcgggccttttcctgaatgcgatacgctttaatcaatgaaggaagggcatcgggtaccccgcttaatacagacttgttgccgtctttttccttcaacttaatctgctcccagttttcagaaactttttctgccgtatccgccttcacttcgccaaatacatgcggatggcggaaaatcagtttgtcgcacaacttgtcgcacacatccttgatgtcgaaatcgcccgtttcactgccaatcttggcatagaataccacgtgtagcaatacgtcgcctaattccttgcaaatatttttcttgtcgtccttcatcagggcatcacagagttcatacacttcttcaatcgtgttcggacgcaaactttcattagtctgtttacggtcccacggacatttcacccgtaactcgtccagcacgtcgagcaggcgtccgaacgcttccatcttttcttctcttgtatgcatgattttctatttttctgttttaccctgcaaaggtacgacaaaaaagcaaatcctatttcacttccacctgccagtttatttccagcgggttgtttttcatacgccacaccacgggcagagacggattgtcccatatccacatctcacccccttcatggcggtccactacatgtaataacggacgtccggtattcttttccgattcatcggctacccggtcatacatcgtccggttaaactccatacttcccttttctttcaactgctgcaatgcattctgaggtaacacatacgctgtttccaaagatgagagcgtcaagtgatttccgtcctccggttgcaggaagcacaactgttttccgtttttcaaggcctccggtgtcatggtgtaactgcccgactgccagcgcaggttgcgttcaatcccccaattcatctgtatattctctccttgctgacagaaaactacctgataacggcgggtctggccatgcaacttgaacacaaacttcaatgtatccgatacggcagtctgtgcggacagcatgcccgtgcaccacaggcatgccgttaaaaatccaagtaaatatctttttttcatacgcatcttatttatccaatcccagttcctttccccagtttccgggtttctttcccattttcaataccagctcacctccggccattatatccttgtgacgcaaaacagaatatggatagtcttttccattcaatgtcacaccctggatataacagtttttatccgaaagtcctttggccactaccttaaattcctttcctccttccagatggaaagttgtagactccagtagcggtgtatgaatcaggtaataatcctgtccggcattcggatacaaacctatcatgtggaaagccagccaggaagacatggcacctgagtcatcattacccggcaaacctaccggaccgtcgttgtagttctttgcaataatctcacggatacggtcgcttgagcgccagggtttacccagccagtgatacagacaaggtgtcaggaaagacggttcgttattgacattgaagaaacctttgtcaaagaaaatatccagtcgtttctcaaaatcggccgccccgccacatttctctatcagccccggcacatcgtgcggaatgctcagcgagtattcccaagagctggcctcatagaaaaacatgccccaccagggagtgtaccacggtccttcgaaggtgaccggtgtatatttaaacttcggctgcatgcgagtagaatgaccgaaaggaatagagtccaaccagtttccttccttgtcgcgcggcatgataaagcctttcgccccttcatgctcataatcactacgccacaagtttttccagttttccgactgcttcaaataacgctgatacaggtcttctttacccaagcctttagctaccaacgcaatggcataatcacaataagaatattctaccgtacggttacctgcacggtcaataccatgaggtatgtatcctaactccagataaggaatcagtccaccccggccttctgcctcttcatttccaccgggaggtaccgtagcatccttcagcatggcttccaatgccagttcataatcaattccttttaatcctttcacaaaggcatcggcaatcacaatctccgcattcgaaccaccctgcgtacggccgttactgttaccgctacgtgcatcgggcatataaccgtcacgtttgtaaatgtttaccagcgaacgcacaatgtcagcttcccgtttcgggtcaatcaaagttatcaacggagaagaactgcgatacgtatcccaaatggcataaaaatcgtcataataaggttccggatcactccacagcggattctcgcccgtacggtctaccggcatcagcatggtatgatacagtccggtatagaacatgcgtttctttgcaagcggagtagacggatcgatttctatcttttgaaacaattgctcccactgtcctaacaaatcctgatgtaccttttcaaatgaccagtgaggaatttcggaatgtgcattgaattttgccttctgcatgctcaaaaaagaaatgcccactttcaactgcaccactttatcgttcttcgcaaaacgcaacaaggcaccggtcttttctgcagagtcatactgcgactgtgcctccgtaatacggttacctttccaggtaagtgactgcacaaacgggcggtctgtttccgcatagaaatataccgtataagcctttccgttgttccatccgccacgaatacgtgtatagcctgctacttcatggtcggaaagtatctgaatttcagaaccgacaaactgctgcgcctcgcgtgcatccggcaccggattttctcccaagaagaaacccgcatccactgccagcgatttcaaagaatcttccggataagtaaaacgatagaaagaagcacgattggcagtagtgatttccgtacgaatgccgttctgcttaaactgcgtgtcataatatcccaaacgaatggtttcatactcacggtaatcataatggttgacccagtccattccatctccaaatggagtgaccagcacattaccatacttgggacctccccccgtaccactgacatgcacctgagcaaatccatccacccgttccggcataggcaaccatccgctattgggcgaaggcgtacagtcgggcgaaggctttaccatgccatacgggcacgacggtccgataaatacacgtcccagtccctcggaaccgatacgagggtcgacataagaagaatactcataagaatctacggaagtttgtccttccactgttcctactccaatgaaccccagtagaaacaagcatattgattttgtgttccacataagtaatatagtttcaacaaaagtttaagcaaacatttaattctcattttaggcaaaagtaaggagaaacacccagcctaaagaggaaaataatgcaaactaagagggaaatagtacacttcacggagttaatcgcctgtgattgcatctttttccaggtcaatcacaaaattctgacaaggttctccattcagaaaagcaaggaaaagcgtacccagcccgttcacaatctccacttctgccgaacgaagtggagaaatacgcgcacggtcaaacagataacgataagccgccaaacgagtttccggaatatctttcaacgccaggcgttctgcataacgcagacgatataaatccagaaccaaatctttcatacaccagtcagtccagtcagcatcatccgacttatcttctcccgacacggcttttagcatccgggcaccagtaaaatccaggcaggcctgccaagattctggaaggtcgcgcggtatgaatcgcaagcgaaccaaatcacgaaactgataatcacagaattctccatacgtacgggcagaaagaatttccttattccatacaggtgaatgtcctctcaaactgtccgactggtattccgcccgatacaaaggaaacaagctatcgaatcctggcaccgtgtccagcatcaccgtttctacccgaaatacctcatcgctttcaatggtcagaatcttataggccggcacataggttgcaattgaaggaacctgtatattatataggtgtttcccgtcttttccttcccagataccagtatcattcacgtgcatgtgtccggcaaaatgcaaacgaagtccaacttgcagaaaagcctcactcacttcggcctccggcacacggtgcaaatcgaagcagcggtctccccacatccgacgtacagattccgacactccgtcattgaaatcgaccaacggataatgtgaaaatgctaccaacgtcttatggcgtttccgtgcttcttctactaccttccgcacccaaggcaacaggaacggtttgtgtttcagtacaagattatatccggcactggaaccttgataggtccactttccatccttcatttcttttggaagataaactcccccgtcaatagccagcagccagagtccgtctaccggttctaccaagtagctggcatccgtagccgtcagcgaatcgcacaatgtgtaggtccgcttgcccaatacactttcacggcaagcatcctcgtaagcatacttgtcatacgtataagaagtaaaaggactttcccaataacagtcgtccttccgagggaaaaagccaaaatcggcataacattccatctgtgacacatatccggcacacgaatcctcacgcgtcacacggcttccgtcagcggctaaaaaatgtgtattctttttcacgagccctaacggaagagccggatcgtgattacccgtagtcacaaaaaaacgcattcccttcgctgcagcatacgaattcagcagttcctttattttttgctgattgaaaaattgcccgtcatccgtcaaatcgcccggcaacactacccagcgtatatctctgcgagctacatcgtcaagagcagctaaaaatacataataattttcattgaacaagcgggtggactgtacctgtgcctccatagaacgcacccgttcggcatggccgtccacatcctgaatatgtgcatctgaaataaatgcaatctgcgtttgtgcactgccttgcaaaatcattccccacagacagattgcaagacatattttcattattttattcataaagaagcagttgataatctcttgcaaatataaagattttacaagaaagaatgcacgttacccgctttcttcaacacagtattttcatcttttatacgcccataaaatgtttttaaagtcactatacactttctatgtttccctgcgcaaaaccttatgttttccggacgggaaacgtatagctccgccacgagaaacgtacggtttgcgtaaggaaaacataaaacactgtgctccatttccctttatatataaaggagatactctttaatggttagggcattgatgttctccgccctcatgatgatgatcgcagcctacgccagaatcctgtatctttccagccagataggcctcagccacctccatcacagagccatggcatcctctgattacttctatgccacaagctgaaagttttgccagcgcacctgcgcccatatttccggccagcattacagtcaccccgtctgcctgcaatttggaagcaatgtccgacttacatccacagcattgtggagaaggaagcacttgtgtgcgtacaatgcggttttcttcatcgacagtgaaaatggtgtaaaactcacaatgaccgaaatgatcgtctatcagaccgtttcttgtaggtaaagctatctttttcatacgcgcattatttgataatttattggcgcaaaggtaaagaaaaaatacctgtacttacactatcgggccagaacaaatgaagttttcgggcaaagccccctaaaatccaagtagttttattatttttgcagccgattatacgataaacataataataaagatattataaccatggaattagcaagtaagtacaatcccgctgacgtggagggaaaatggtaccagtattggctggaccacaaacttttcagttctaaacccgacggacgtgaaccttacaccgtcgtcattcctccccctaacgtgacgggagtgctccacatgggacacatgctgaacaataccatccaggatattcttgtaagacgtgcccgcatgatgggaaagaatgcgtgctgggtaccgggtacagaccatgcatccatcgctactgaagcaaaggtggtaaaccgtctggctcaacaaggcatcaagaaaacagaccttacgcgtgaagagttcttgaaacatgcatgggcgtggacagaagaacacggaggcatcattctgaagcagctccgcaaactgggcgcatcatgcgactgggaccgtacggctttcaccatggacgaaacccgtagcaagagcgtaatcaaggtattcgtggacctttataacaaggggctgatttaccgtggcgtacgtatggtaaactgggacccgaaagcactgactgccctgtctgacgaagaagtaatctacaaagaagagcatagcaaactgtattacctgcgttattacgtagctgatgacgacatgagcggtgaaaccggagctgaaggtgaaatcgtacaccgcgacgcacagggtcgccgttatgccgtagtagctacaactcgtccggaaaccatcatgggtgatacagctatgtgcatcaacccggcagacccgaagaaccagtggctgaaaggtaagaaagttatcgttccgctggtaggacgtgtgattccggttattgaagacagctatgtagacattgaattcggtactggttgtttgaaagttactccggcacacgacgtgaacgactacatgctgggagaaaaatacaaccttccttctattgatattttcaatgacaacggtacactgagtgaagctgcaggactgtatgtaggtatggatcgtttcgacgtacgtgcgcagattgaaaaagacctggatgcagcaggattgctggaaaaggtagaagcttatacaaataaggtaggtttctctgaacgtaccaacgtagccatcgaaccgaaactgtctatgcagtggttcctcaagatgcagcatttcgctgatatggcattgccgccggtaatgaacgacgagttgaagttctaccctgccaaatataagaatacataccgcaactggctggaaaacattaaagactggtgtatcagccgtcagctgtggtggggacaccgtattccggcttactacttgccgaaaggtggtttcgtagtagctgaaactccggaacaggcattggaactggctaaggaaaaaaccggagatgcaaacctgaagatggaagatttgcgtcaggaggatgactgtctcgacacctggttctcttcatggttgtggccgatttcattgttcgacggtatcaataacccgagcaacgaagaaatcaagtactactacccgactgccgacctggtaaccggaccggacatcattttcttctgggtagcacgtatgattatggctggctacgaatacatgggcgacatgccgttccgcaacgtatacttcaccggtatcgtacgcgacaagattggccgtaagatgtcaaaatcactcggtaactcacccgacccgctggaactgattgaacagttcggtgccgacggagtgcgtatgggtatgatgctggctgctcctgccggaaacgatattctcttcgatgaagcactttgcgaacaaggacgtaacttcaacaacaagatatggaatgccttccgtctggtaaaaggctggcaggtagccgacatcaaacagccggaatacgccaaactggccactgaatggtttgactctatgctggctaagaccgcagaagaagtaaacgacctcttcggtaaataccgtctgagcgaagcattgatggctgtgtataagttgttctgggatgaattctcaagctggtacctggaaatggtgaaacctgcatacggacagcctatcgacaaggtaacctacgaaaagacattagcattctttgaaaccttgctgaaactgctccatccgttcatgccgttcatcacagaagagttgtggcagcacatttacgaccgtcagccgggcgaaagcatcatgacacagacactcgtaaaagacatgccttacaacgaaacactgattgcacagtttgaagctgtgaaagaagtaatcagtggcatccgtaccatccgcctgcagaagaacattgcacagaaagaagctttggcacttgaagtaactggagaaaatccggtagccggctttggttctgtaattgccaaactctgcaacttgtcagaaatcaagcaggtagaaaccaagtcggaaggagctgctgccttcatggtgggtactacagaatatgccgtaccattgggtaacctgattaacgtagaagaagagctgaagaaactggaagctgacctgaaatatcaggaaggattcttgcaaagcgtaatgaaaaagctgagcaacgaaaagtttgtcagcaaggctccggccaatgtcattgaaatggaacgcaagaaacaggctgatgccgaaacaaaaattgcggcattgaaagaaagcattgcggcattgaagcgttaagtttttagccgagaaatatttattcacaagggctgtcacatgacactgtggcagcccttattttataccaaagaagacaaattgtcagatactactgacaaggggacaaggcctattgtcagcttatcctcatacattgatttatgtcaataaaaagaggaaaaaataaaattatatgctttaaaacatgtttttcaaaaaaaaggcattacctttgcagtgtaataaaacgaacgaaggaacctgaaagggttctggaggaaaggataaaaagattaaggataacaacaataggtaacaaagatttgaaaggtcctctgcgaagagcacctcgaaaaacaataactaaactagagattaagatacaataggtactaacaaaaagcaaatgaaaggataacagttatgaaaaaggtaacaaagattttcaagaagattgcaaatgcagatcctatgatctgggggtacgtcatgttgagtgaaaacgctcacacgaagtaacccgctgccgatgaccggcggatttattatgattcgaaaacaaaacaattgacaatagaaagtccggaaatctattttctgacaacatgcagaagatgagatttccggacttttttatttttttgacgatataatctctatcgaatcggctgcaacttgataatttctcctaactcaggaataatgaccggcataccgcgcttcttggcttctgccgcaaacacatgaggaggatcgaacaagggttcatctgaaaggtcaaaagtgccataatgcatcggaattgtaacctttgcatgcaaatcggccgaagcagttaatgcatcatatggagatatatgattcggcttcataaaccagcgaggtttgtaagctccgattcctaccatgcaataatctatgtgaaagaaaaatccggctatttcttcaaaatgccgggcatatccggtatctccactattgtaaatggtaatcccatctccctgaatcataaaggaaccccacaagcgctctcctccatcgctcacaccacgcttgctccagtgctgtgcaggtaaaaaagtcaagcggaaatcaccgtcgacatactgttcataccatgcggcctctatcactttcagattaggaaaccagcttttaatcaaagcccccgtgttcaaaccacaaaaaagtttaagttgaggattgtctgctaccagacgtgccacactcggtttatccagatggtcaaaatgatcatgactaataagcagataatctatctgacgaaagatagacggatcggcaggaaattgacttcggcgtttgacaaacggaatgcttccatatacaggatcaatcatcaaacgctttccacccagttgaagaaaaaaagagttatgccccagccaaatcaatgaattacccaccactttctccaaggaagtgagataatgtactttgggattccacttgattgtacgcttttctttccgctgaggattaggagagaaacgccatttcaggacactccctacacctggcttccaacgatgctgacggttaaaaaacttaccattcaccgtcggattccctctccaatgaggatgtatgcttcgcaacccctcattgcggcggaatgtgattcgctctcccattctatcggaatttaacgttccagcaaatccttcaaaaaggcatccagttcttcatccagcccttttagcagctcatcattcagtagcaaggtatcatcttcgtccacaagaagcaattcggctaccgtttctttgtcttcgtctaccagtacaaaagagtaaggcttcatcagacaaagcttctccagttttccgctctctttcagcgcctcaacctcagcacgaagaatcggttctactacagtatagaagtcatcactctcatattctacccactcattgataatcgtacgcgacaattcctgatcgtcatcgtcgaaaataatcagctcaccactttctgagttgggttgcaaatgaatatctgtaacgaccgtttcatctccttctgatgtataccggcaaagggctgttttcagagccgagactattgaagcacgtgattgttcactcattttcataggctatattctttttatgtactcaaatgtacaaaaaaaatgaatcgaacaagatattattaattgaatttgttgccaaaacgcgccatttggaggttcagcaactgaaaatccttagcccgctcctgtaaaattgtagaataaaagagagcagcacgttcttcttccgaacctttagcagcacagctttttgacttctcaatccagtcaacagcttcgctcatcattccctgtacctcacaagccaaagccatattgaaggcggcacgcgattttaactttcccttcttcaatgagtcgtataagttcttccacaagcgaccggcttcctgccagtctccttcacgcaacgaaacagccgcatcacgcatatccggatttcctccatcaaaataaatgcgatccacactcttccaatgaggcaccagttgatttacgagtgtaaaacctgtgtgctgagaggcttcgttcaccacgtcatgatcagacaatgtgggattcaaatcccacaacaagctatctaccttgctgatagtcacgactggcattacccgagaaggaatatatgcacgcagcacaggacgcattttcaaatcaaaagcagcaaaaggaaccatcaagcccggataataaatctctttcttaccagtcagcaattggattctgtctacggaaagaatcatgtctactccaagtacctgagccaggctgtctactaccggttgaggaagaatttctccttctgtcagctcctgtgtaatcgctgaatcagaaataactacctgctgaaaataacgactatccgccaggcctccggccagagtttctgacaacacttttccatctccatctaattttcccaatgtcagcaaattctttttaggggaaggaatggcaggcgcatgatttactactgccaccgtgcggacttgttctggaaaagtgacttctgcaggatataactgatcaaatgtaaaagactgaagtcctccgcatgaaaccagcatggtagctgcaaaaaggattccggccacgatgtatttcttcataattcactacttttttgttcgcaaacaaaaataataaataaaaaagacacggattccatcgttttcacagattattctaaattaagaaataaaaatctgcaaacggtgaaaaccgtgtctcaaatatctcaatcaaatgcctaatcaagcattcttaccgtgacagttcttatatttcaatccgctgccacaaggacatgggtcattgcgaccgactgtcttttctgcgcgataaggctcttgcttctgttcacgagtatcgcgacctgcagcttcacgctgatctgggtcagtcaaatcctgcttttcttcacgatactgctgacgaggagcctgaggttcaggagctgcttcacgcacctgttccggttcctgtaccggtatctgaccacgcatcaatacagaaatggtattattatttatcttgttgaccatgttatcaaacagattcacagattccagtttgaaaatcaacagcggatctttctgctcatagcttgcgttctgtacagaatgtttcagttcatccagttcacgcaagttttctttccatgcatcgtcaattgtatgcaacaagatagctttttcgaacgacttcacaatttcttttgattcgctttcgtatgcagctttcaaatttactgaaatgttgtacatacgcttgccatcggtaataggtatcatgatattctcatacatgtgtccctgagcctcatatacctgcttgataaccggattagcaatctgagccatacgttcagtcttacgtttgaacaatgccatagcttcctgaaaagtctgctctgccagatcgtctttcttcttggaacggaaatcttcttcagtaaacggagcttccatagccagtacctgaagaatttccatcttggcatcatcataagtcggctgctgtacggcattgtaacaacgttcccaaatcatatccacaatatccattccgatacgttctcccataagtgcatgacgacgtttggtgtaaaccactgtacgctgcttgttcatcacgtcatcgtattccaacagacgtttacggataccgaagttgttttcttccaccttcttctgcgcacgttcaatggagttagaaatcatcttgtgctcaatcatttctccctccttgaatcctaacttatccatcacagtagcaatacggtcggatgagaacagacgcatcaaatcgtcttccaacgatacgaagaatacagaagaacccgggtctccctgacgtccggcacgaccacgcaactgacggtctacacgacgtgattcgtgacgttctgtaccaataatggccaaaccaccggcagctttcacttctgcgctcagcttaatatcggtaccacgaccagccatgttcgtagcaatagttaccgtagaactctgacctgctttcgctacaatttcagcttccttctggtgtaactttgcattcaatacattatgttcgatcttacgcaaggtaagcatcttgctcaacatttctgaaatttctactgaagtagtacctaccagcaccggacgaccagcctgtaccatcttctcaatttcttcgattacagctttatatttctcacgtttcgttttataaacgcggtcgttcatatcgatacgggcaatcggacgatttgtcggaatcaccactacatccagcttatagatatcccagaactctccagcttctgtttctgcagtaccggtcatacctgacaacttatggtacatacggaagtagttctgtaaggtgatagttgcaaaggtctgtgtagcagcttctaccttcacaccttccttggcttctacagcctggtgcaaaccatcgctccaacgacggccatccatgatacgtcctgtctgttcgtcgacaatctttacctgaccatccataaccacatagtccgtatctttttcgaacatggtgtatgccttcaacagctgattaatggtgtgtacgcgttctgctttaatggcgtaattggtcatcaactcatctttcttagccagacgttcttcatcagacagccctttctgattttcaagttcagacaactgagctgcaatatcaggaagtacgaacaaggtaggatcctgtgagttaccggtaatcaggtctactcctttatctgtcaaatctacgctcttcagtttttcatcaatcacaaaatacaaaggttctaccgcttccggcatacgcttgttattctgttccatatagatttcttccgtcttcagcataccagccttgatacccggttcgctcaggaacttaatcaacggtttgtttttaggcaatgctttgtggctacggaaaagagcaaggaaaccagcttcctgatcttccttcttatctgaagcaatcaaacgtttggcatcggccagatactgggtagccagtttacgctgtgcttctaccagacgttctaccaacggacgaagtacttcaaataattgctggtcgcctttaggcaccggaccagaaataatcaacggagtacgtgcatcatcaatcaatacagagtccacctcatcgacaatggcataattatgcttacgctgtaccaaatccttcggagaaacggccatattatcacgcaaataatcgaaaccgaattcattgttggtaccaaaagtaatatctgccatatacgcacgacgacgagcttcagagttaggctgatgcttgtcaatacaatctacactcagtccatggaacatatagagcgggcccatccactcagagtcacgctttgccaaataatcgttgacagttactacgtgtacgccattaccagttaaagcattcaggaacaccggaagtgttgctaccaaggttttaccttcaccggttgccatttccgcaatcttaccttgatgcaataccacgccaccaaacaactgcacatcgtaatgtaccatgttccaggtcatttcgtttccacccgcattccaatgattcttccaaatagccttgtcaccttcaatacgaacaaagtcacgtccctgtgcagcaagttcacgatcaaaatcgctggcagttacttccaattcttcattttctgacaaacggcgagccgtatcttttacaatagaaaaagcagtcggtaacacttcactaagtgctttctcgtatttttccaggacttctttctccaacttatcaatttgagagaaaatagcctcacgtttttcaaggtcagtagattcaatcgtagctttcagctcttcaatctttttattttcctctgcggctgaatccttgataaacttcttcagttcttctgttttcgcacgtagttcatcgttcgtcaacttggaaatttccggataaacggcttttaccttttctacccacggctgaatttccttcatgtcacgagacgccttgtttccgaacagcttgcttataaattcattaaatcccattgtatatttcttttttattatttactaattaattttttattcatcctaccgctacaaagataggtaaattgtgaattattcgcatactatttatttacgaatattaatcattggagcctccgaacaagcatttggcgctcgtatgcgcatgaaatgagctaaagtgggtacaattgaagtaatttttaccggagaataaagcttttcaggcttaacatcaaatcccataaacacaagcggagccgcagtatatgcttcacgaaccacttctaccttctgagaatattcgttgaccacagaccatcccggcattacttctacataaatatcgcccgagcaatttggattatatgtatttcgaatttttccaatcttcggagtccaagctcccaaaagcaaacgctgtgctgaataagcattctgtaccccactcatttgcaccacaaattcagaggaacgcgtcatcacttccaccaaattcagcttgcgctcttctatcagtttgtgattcaaataaatttgtcggtcataatacgtctccacatattggccttgtccataaagagccattaaatacatgttcagtaaagctgcacaacgtttaatgtgaaattctccacctggaatcttgtatttaaccggatccacaggttccggatcggtataacccgtagaagtgataaagaataagatattacgaagcccgatcttacggtctatcaaatccaacaaatctccaatgctgttatccagacggacatacatgtcctgtatttccatcgcatattccgtattgggcttgtgatcataatttcctgcataataagacaatgtcagcaaatccggagctgcatcctgcccgatttgcgtattgcttaagcatgcatttaccagacggtttacctcgtcatttacatatggacttgtcttaaactttttatatttatccagacgttcatccgagaaattatgcttaaagctaagctgcttggtttcagtagtgatatactgataagaagttaccggcaaataaggaagccactccaaattattgatacgaaaatcaagtccttccttatcattataattgcttacccacaacgggcaatctccataataagtcgtaccagcccacttcccggtttcatcattcaaccagaaagcaccatttgctgcatggccggcagccaaaatagccatttcacgagtcggtgcaatagaataaacttcagcccgtccctgagtagctaccttcaattcatccgacaaggtggaacaacgcaacaacttagcagaagagctttccgatgtatatacccccataaaatcctggtcatctaccgattttataatccgtaaagacccacggtccatccagcggttagaaggaataccattataataaggtgtagtacctgtataaatcgaagccgtagcagacgaacggtctacattgataaaatcatattccgcattggtatatatacgtccttcttttaaaaggcgcttaaatcctctctccccatacaatgccgaaaaagcttctatgtagtctgccctcagctggtcaatcgtcaaccccaccaccaattttggaactggagaaggagcctgcgcctgaattccagagatgacaaatacagtcaataaagatgtcagtatacgttctttcattactttttattcaatactaatacatggcttgcagcatttaccagcaaaccgagtgccaaaggtaatactgttaaattaaaatcttgcggtaaaaacgggaatagcactataaaaagtgttaaatacacgagattacaagtatgatacaagtcttttttatgttttaactcacgataaatcataaaaggcaggtaaaacaatggcaacggattaaacaaaaccaacaaccagtttgaacctacagtcggatgagaagagacgaaaaacaggaaggcaataatacaaccagctattccttgagctgcatacaataagatatcccatccccagaaaatcgtttgtttcttccactggaagaatccgataattacattcaaaagcaaaaataaagtagcggttaccatcggacttattccccaggaagattctgcttccaattcggcatccacaatcttttcctcacgcaagaccaaaggccgtctgcctccgtctggagtctgaatgtatgcatcctgagcaaaataacgcatataaaacggagcaaacatttgctgccttatatctatcggcttatcagcttccgctccaagacacaaatctatacctaattcatcccacggagagcctttggtaaattcatgcacaattcctctaaaagttttatgccaacttacggaaggatacacgacttgtccctgaatgcttttttctatctgatcacgagcacgggtcgtacaattatcatagaaataattataacgataaattctgttttccggaagataattgtcctgaagcaatttcagcaacgacattttctccgaatatgtcaaattcaggatctgctgataaaccgaagagcccctgaatgcatattccgattcaaaataaggataaggtgtaattcctaactggtagtctgtttcaccttttacaaagcgatatacaaaatgcggcgtattgaaactaaacattccataattaaacaccaaatccacgcctctggaaaaattctgataacgaatagctgtatgaccaaaaagtgcatagatttcattgcccggcgcacaagtcagcaaactgaactgaatgctatcagtttgcggcattttttccacattatccgagatttctcccctaacccttaccggagagaaaaggcaacttatcaagaccacccaacacagaaaaacaagcttctttttcataaacaaatacaaatatcaccagacaccggtatatcctgaagtatctgaataattcataatattttttttcgcatgcaaaaatacacggattctaccataagagcgaaataaataatcagttttattgatgtgcatatccaaaatttatcttactttgcaggcgaaacaaagaaagaaaacgtgaatctagtaattgatattggtaatactgtagcaaaactggcagtatttgatggtgataaagtggtggaggttttaagagggtccaatcattcgctggactggctgtcaatgttatgcaacaaatatccaatcgaaagaggtatcatagcatcggttatcacactcagtaacaccatacgacgccaattggcgggagtgccatttgaaatcattgagctgaaccacctgactcctattcccatccgtaatttatacaaaacgcccgaaactttgggcatggaccgactggcagccgtagtgggtgccaactacctttcacccggaagaaatctgctggtagtagatgcaggaactgcactgacctacgagtttatagatgcagaagggaattactggggaggaaatatttcacccggaatatacactcgttttaaaacactgaacgcctgttgcgataaacttcctttaattgaaagaaaaggcgagacacccgaatttggatttgacacggagacggcaatccgtgccggagtcatcaggggaatagaattcgaaatcattggctacatcaccctgctgcaaaagaaatatcccgaccttttggtttttttaactggaggagataaattttcttttgatacaaatttaaaaagtatcatctttgcagatagatttttagtattgaaaggtttaaacagaatattgaattataatgttaagtaagaaaatacttgttggttcatggcttttagctagctctacagtggtgtgtgcgcaaataagcactaactcaccttatacacgttatggacttggggacatgttcgaccagagctttacaaacaatgcagcaatgggaggagtaggttatgcactccggacacccgagcatataaatgccatgaatccagcttcttatacggctgtcgattctctttcttttatttttgatgccggaatgtctttaaaaagttccaactttcaggaagggaaatacaaagccaatgccaagaactccagcttcgactatatcggaatgcagtttcgcttgcatcctagactgggcatgacgattggatacactcctttttctacagtggggtataactttacccgttcaaaagaaatagagaatagcagcgatgttaccatatccaataatttttacggagatggaggattgcagcaaatttttggaggtgttggattcaagattctggataatttatctatcggtgctaatatcggttatttatatggtaagctcaattaccagacgacagccagtctcagcaacggtggcgaccagaccataacctacaatacagtatctatcagcagttataatgcaagctttggtcttcaatatacccagccgataaacaaacaaaatgaattgactttaggtcttacctatagtttaggacataccctaaacgggcatgatacccaagggacacagattactaacggaactaattattctgtcgtaaaccagcaacaaatagatgactcttacggaatacctcatatatatggaggaggtttagcctggaaacataaaaagaatctgacagtagaagtggattatacgctgcaaaaatggagcggagtaaaatacaacaatcggacagatttataccaaaaccgttctaaagtagccatcggagctgaatttttaccaaaagaattcggacgaagctatcttagccgtatacgctatagagcgggtgcctattatgcgaactctaatctccaaattccagtgtcacaaaatatgatagacggtcctaaagaatatggtgtcagcgtcggattaggtttaccgttaaagctataccaacgaaacagcgtattaagtattaccggacaatacatccatgccaatccttctgtaagcgacatgctatcggaaaaccgatttgtcttgaaaattggattgacattcaacgaacactggttcatgaaatggagagtaaattaatatgaaaataaacacaatgaacaactaatcttacatacgatgaaaatgaaaatgtttacaatgctgtgtgctttatctttgggtaccacagcagctttcgctcagaaaggtgtagaagacggatctcgtttcggacatggagaagacagtatccgttgtttgcagaacatcagtatttacagtgaatacgtaaagactgacaactttacagatgcatacaagccttggatggctgtatttacagaagcacctttagctcaggttagtacttatacaaacggagctaagattttgcgtgctttaattgccagttctaaagatgctgctcagcagaaaaagtatctggatgaattgatggctgtacatgaccaacgtatcaaataccttgacggattgaaccagttggtaaaaactcctactacaaaaggttctatccttggtatgaaagctcacgattacatcatcttctcaggtgctaatgttgacgtaaacaaggcataccagatggtaaaagaagccgttgatttggaaaaagctacatctgattatttcatgttccaggatttgatggatatctctgctcgtaaattaaagagtgatgacactcataaagaacagtttattcaagactacctgacagcatctggttatgcagatgaagctctgaaagctgctactaaagaaagagacaaaaaactgctgaaaacagcaaaagataacgtagatgcatacttcatcaacagtggtgctgcaagctgcgaaaacttgcaggctatctatggcccgaaagtaagccagaacaagacaaatctggattacctgaagcaggttatcaatgtaatgcagatgctgaaatgtacagaagaagaagcttatttcgttgcttctgaagctgcacatgcgatggaacctacagcagcaacagccgctggatgtgcttacatgtactacaagaaaggtgacttggacaagagcgtacagtactttgaccaggctatcgaactggaacaggaagcagaaaagaaagcagactatgcatatagtgcagcagtggtattgttcagcaaaaaacagttgagcaaggctaaacaatatgcaaacaaagctatctctttcaacggaagctacggaaaagcttatatcctgattgcacagatgtatgcatcaagcccgaattggagcgacgaagcagctttgaacaaatgtacttactttgcagccatcgataaattgcagcgtgcaaagagcgtagatcctagcgtagcagaagaagctcagaagctgatcaatacatacgccggacatactccgaaagatgaagacctcttcttccttggtttgaagaaaggtaactcggtaacaatcggcggatggattggtgaaacaacaaccatcagataagtatatgtcaatcagacttaaagaacacatatataaattatttatcaacataacagttgccacatgggcaactgttatgtttctttttgttcctgcatgcgggagcaaagaaaaacctactgctgcagccgtaaaagaaggagactctcttcccgacatgcgtactacaggagtaactaccctcgtatctgactcaggaatgatcagatacaagattattacagcagaatggcttatctacagccaccggaatcctccgttctgggcgtttgaaaaaggaatctatctggagaaattcgacagtcttttccatgtagatgcaagtatcaaagctgacacagcttattactacgagcccaagaaactatgggagctacgtggaaacgtccatattcagagccaaagaggcgacaaattcgacacggaactaatgttctgggatcaggacaaagagaaaatctattctgataaatttatccgtatcgaacaaattgacaaggtactgactggatacggtttcgaatccaatcagcaaatgaccgaataccaaatctataacaacacgggaatctttaccgttgaagacaatgctgtccaggcagacagcacacaaacttccaaataaaactattagtatggagcttatcatccaactacttatatctatggtgttttcagcctatttttcaggtatggaaatcgcctttgtatcttccaacaaattacgttttgaaatggaaaagacgaacaatgtatcgtcttatatcctttccgtattctaccgacactctaataatttcatttccaccatgttggtaggaaacaacattgcattggtcatctatggtatcttgatggctcaacttattgaacattatatacttgcagatgtgatttcaaatcaggcactgcttgttcctatagaaaccgtaatttccacattgattattcttgtcactggagaatttcttcccaaaacactcttcaagattaatcctaacgctactctgaaatttttcagcgtaccgacatttgtatgctacatcatactctaccccatcagccgtttttcatcgctgctttcaagcggtattcttcatcttgtgggggtaaagacaaacaaagaagaccgggaaaaggcatttaccaaagtcgatctggattactttatccaaagtagtatcgaagaaggaaaagagggagaagaaattgacaatgaaatcaaaatattccgcaacgcacttgatttctccaatgtcaaaatacgtgactgcatgattccacgaacggaaatcatagctgtggattttgatactccgctcactgaacttaaaaaggtatttattgaaaatggtatcagtaagataatcgtttacaaagaaaatatcgacaacattgtgggatacattcattcatctgaaatgttccgcagcaacaacgaatggcaaaacggtattcgtagcattccctttgtgccagaaacaatggctgcccacaaactgatgcgaatattcaaacagcaaaagcgatcactggctgtagtagtagacgagtttggaggcgtttcaggtatcgtggcactggaagatctgattgaagaaattttaggcgacattgaagatgaacatgataccacatccatcgtcgcaaagcagatatcggaaaacgaatacatcttctccggaagaatagatatagaaaaagccaatgaaacctttggcctgaatctgcctgagagcgaaaactaccagaccatcggtggacttattctgaatgaatgtcaaagcatacccaaagtaaacgacgtcattcagactgagaattttaccttcaaaattatcaaagtaagcgccaataaaatagaattggtcaaactgtttaccacgaaataagcatttttttgagagaaaatagtgactaaacagtattttttgtatcttcgtgcgctaataacagaactataaaaacaataaacaaaaaaataataactttaaatggcaactttacaaaaaattcgaagcaaaggacctttgttggtcatcgtaatcggtcttgccctttttgcatttattgccggtgacgcatggaaagtactccagccgcaccaaggtaaacaagacgtaggagaagtgaacggggaagttctcagtgcacaagattatcagaaaatggtggacgaactcagtgaagtcatcaaactgaccaatggattgaattcgctgacagaagaccagttgaacaatgtaaaagatcaggtatggcaaagttatgtcaacaacaagctgattgctgaacaggcagaaaaattaggcttgaaagtgacagacgctgaaatacagagcatcattgaccaaggcacacacccgctgctgatgcagactcctttccgcaacccccagactggtatgttcgataaagatatgttgaagaaattcctggtagattatgcaaacctgaatgcaagccaaatgcctgcacagtatgtagaatactatcagaaaatgggtgctttctggcagtttgtagaaaagactttggcacaaagcactttggctgaaaaataccagaacctggtaacaaaatctttaatctctaaccctgtagctgctgaagatgcattcaactcacgcacagaacagagcgacctgttgttagctggtgttccttacagctctatcaatgattctacagttcaggtttctgacagtgaaatcaaagaccgctacaacgaaaagaaagaacagttcaagcagctggtagaaacacgcgacatccgttacatcgacgtaaaagtagttccgtctgatgcagaccgtaaggctgtagaaaaagaagtaactgagtacagcaaccaattggctagcacaacagctgattttggaactttcgttcgttctacaggttcttcagtaaactactctgatgttccggtaagcaaatccgtatttcctgcagacgtagcttcacgcctcgactctacaaatgtaaacgaagtatacggtccttactacaatcagacagacgattcattcaatgcattcaagttgcttgcaaaagtttcttctcctgactcaattcagttccgtcagattcaggtatatgctgacactgaagaaaagacaaagacactggccgacagtatttacaatgcattgaaaggtggtgctgacttcgcagccgtagctaagatttacggacagacaggtgaagcaacttgggtaaacgcacagagctgggaaggttctgaactggatgcagacaacagcaagttcatcaacacattgctgaaccagcctgtaaacgaactggctaacctcaacatgggacaagctaacctgattctgcaggtaatgaacaagaaaagcatgcagactaaatacaaagtagctgtcgttaaacgtgaagtagaattcagcaaagaaacttacaatgcagcatacaacaaattcagccagtttgtagcacagaacactactatcgactcaatggtgaagaatgcagaagaaagcggttatacactgatgcctcgcacagacctttcaagcgcagaacactatgtaggtggcgtacgttctactcgtgaagcactgaaatggatttttgctgcgaaaccaggtgaagtttctccgctgtatgaatgtggtgaaaacgaccatctgatggtagttgctcttgacaagattcatgaagccggttatcgcgacatcaactcagtagctgaaatgctgagagctgaaatccgccgcgataagaaagctgaaaagattatggaagaaatgaagaagtataattccattgctcaggtgaagggaatgaaggatgctgtaagtgattctgtaaaacacgttacattcagtgctcctgcttacatttcagttacacgcagcagcgaaccggttatcggtgctgtagctgctaagacagctgccaacaaggtaagcgcacctatcaagggtaatggtggagtatacatgattcaggtatacgcaaaagaaaaaggaagcgagaagtttgatgcaaaacaagaagaaactacattgactaacatggctgtacgtattgcaggtaaccagttaatcaatgacttgtatcagaaagcaaaagttgtagaccagcgctacctcttcttctaatgcttagttgaattaataagaatcctaaataaaaacagaccgttttgaatgtgaaagcatcaaaacggtctgttttttattttaaaaagcgaatgattctctttacacccccgcatcactcaacaccacatacacctgataatgcgtggttgcctgtaccggagtcagtgacaaatacccttgaaggatacgcccatcttgagcaatctttaacggataggcagataaacatctgtgatgatttttcaaagcttccccctcagccgcataatgttccaccacatattgccccgaagaagaaggagagacataacgatcaaagaacaggcgagacaccactcccatattcaaacgaagattgatttccacacacggatgcaccacatagcctcctgcaacgcgacaaatcatcatatctactcccaaatacccttcataatcatccttcaacagctgttgaagtgcggaaagcagacaggttcttacttcatgtaaaatctcccgagatacatacgctgccaaccgattctcaatttctgtattcgataacaaaagattaagcttgtaatttccatgggcatctgtttcaaacaaagaataaccagcaaaacggactccattctgcttctccacataaaactccatcgcaaaatcaaccactttgtcataaatgggttccgccatcacagctccctgtaccctcagaatacgtgcggcccacccagccagttgcgcattccaactggcagaagatactttcagcagtcctctcccacttcccgaccatggagctttcaaaaccaattctcctctttcctgaagaaacgcttccagttcagacagagatacacaggctttcatctccccgcaagtcccgtctatcttcagtaattcaggcaatacctccagacaacgctgacgagacgagagaaaacggaaacgcctgacagtttcctccgaaggcaaaaagcattcttctactccttcttgtctgagccgatgcaccaaggcaggtgtccacccccaggggatataacgacctgaaggccattctgccgtccaagcagtacgcggcaataactcatcgagccttctttcaacctccatgcttcctccacacacctctctcaactgcttctgcaaaagagatacaagagccatattctccaccttcacacaatttccttcttcagcaaaccaccatggaagaacagataaatccgcaatcatacgcataatctctgcaggagacttataataaggagtgaaattggccatcgccatatcataatccggattaaacaaatatacgttcggaaacatgcttttttcaattaaaaccctacaaaaatacgaaaaaacagctccgtatttccaacttcctcctcttcatcgtcgaaagaagaatattttttctctgagagttttctcctggaaaaacaaattcgcaaaaaatcaatgaaaaatatttcaaacttaaacctaaaatagggtaaaaacaagtaattttgcactacggaaaatataaaagaagaaagcacacctttttatgcttaagaacagctaaaagaaagtatatttgcatatcgataaaacaaaaagaaagacaatacaactaaatacaatacaaaaagacactacaactaaaagtaaagagttttaaacattaactaaaaacacgaaagcaatgaaaagaatgcaacttaccggaatcgcactgcttttaatgacaggcattccagtcatttcaatggcacaagacaaagtagaagctgatattggagctgaccttgtaagcggatacatctggcgtggacaggatttaggaaatgtgagcatccaaccctctgcttccgtatcctacaaaggcttctccctttcaggctggggttctgtaggactggataaagaagataccaaggaattcgaccttactttaggatacagtacaggaggattcagcgtatctgtcactgattattggtttgatggcggtcctgagtattttcactatggtgcccacaacacttcacatgtgttcgaagcacaagtaggttacgatttcggtcccttagccgtgaactggtatacaaactttgcaggagctgatggcgtaaaagcaaacggtgaccgtgcttattcttcctacttcagcatcgcagcccccttcaagttaggtggtctggactggtcggcagaaataggtgctaccccatgggaaaccagtttctacaacaatggggcaagcggatttgaagtttcaaatatatgcctcggagccagcaaggaaatcaaaatcacagattcctactcgcttcccgtatttgcacaggccatttggaatccagctacagaaggagcctactttgtgtttggcataagtttctaacccaaaagatatactacaatacaaatacaatacaacatcaataggattagtgatttcaagaggcaaaaaagattatacaggataacaaacaatacaaaatacaaatacaatttattatgaaaaagattgaggcaatcatccgtagaaccaaattcgaagaagtaaaggaggcattattggccgccgacatcgaatggttctcctactatgaagtaagaggtgtcggaaaaacccgcgaaggtcgtatttatcgtggggtagtatatgataccagttccatcgaacgaatcctgatttccatcgtagtgagggaaaagaatgtggaaaagaccgtacaggccatcatgaaagccgcttataccggtgagataggtgacggacgcattttcatcatccccgtagaagattccattcgcatccgtacaggcgaacgtggcgatatttcgctttataatgcggaacaggaaaaataatcccggaaaatcaactcaggtattaattcttaaaaggtaaaaattatgaaacaacttacagaaggtgtgcacacagcagcataccgcaaaatcctcatacccttattcttacttctgtttccattgattacaacagcgcagacctctgtacctgaagaggttagcaacgctgacaagatagcggaattatctaccggacttaacaccgtatggatgttactggctgccatgctggtattcttcatgcagccgggctttgccctggtagaagccggatttacccgcagcaagaacacagccaacatcctgatgaaaaacctggtggactttatggtaggttccattctgttctggtttatcggtttcggactgatgttcggtataggagatgtattcggtactccacatctctttgacttggatgccatgagcaatatcattcagaacggattacctattgaaggcttcctaatcttccagaccgtattctgtgccacttctgctactattgtgtcaggtgccatggccgaacgtaccaaattctccatgtatctggcttacacgatagccatcagtgtattgatctatccggtctccggtcactggacctggggaggaggatggctttcaaatgcagatccggattcattcatgatgtctgtgttcggttatacattccatgactttgccggttcaactgtagttcactctgtaggtggatggattgcactggtcggcgccgccattcttggtccgcgtttgggcaaatacggaaaggacggaaaatcaaaagccatccccggtcacaacctgacactggcttgcctgggtgtattcatcctttggttcggatggttcggtttcaaccctggttcacagcttgctgcagccggatacggtgaccagacagccatctcacacgtgttccttaccaccaacctggcagcttgtaccggaggattccttgccttgcttgtaagctggattaaatatggtaaaccgtcacactctctcacactcaatggtatccttgccggactcgtcggtgtaacagccggatgcgacctggtatcaccaatgggagccgctcttatcggagctatctgcggaaccgtcatgattttcgctgtagaattcatcgaacaccgcctgaaaattgacgaccctgtaggtgcctcttccgtacacggtgtatgcggtagcctcggaaccattcttaccggtctgtttgccgtagaaggcggcacattctacggaggtggcttcggattcctcggtgcacagatttttggtgtaatcatcgtcggcggatgggccgcattgatgggatacatcatcttcaaagtcctcgacaaagttcacggcctgcgtgttcctgccagaattgaagaagaaggtctggatatttacgaacatggagaatcggcttacaaccattaacatagcacattcactactaactattaaataaccaataaaaatttacagtcacatgtcaacattaagattcagagtagtagaaaaggccttccaggctaaacccatggaagtacctgcccctgacaaaagaccgggagaatacttcggtaaatatgtattcaacagagaaaaaatgtttaaatacctgccttctacggtatttgcacgattgattgatgccatggataatggcgccgctcttgaccgccagatagccgatgccgtagccgaaggtatgaaacgatgggccagcgaactgggtgctacccattatactcactggttccagccactgacagaaggaacagccgagaaacacgatgcattcgtagaacacgacggaaaaggtggcatgatggaagagttctccggaaaactccttgtacagcaggaaccggatgcttcatctttcccgaacggcggaatccgtaacaccttcgaggctcgcggatatagcgcatgggatccttcatcacctgtgttcgtagtagacgacaccttgtgcattccgaccatctttatcgcttataccggtgaatcactcgactacaaggctccgcttctgaaagccctccgtgcagtcaacaaagcggcagtagacgtttgccactatttcgacccgagtgtgaaaaaagtgatggcttacttaggatgggaacaggaatacttcctggtagacgaaggtttgtatgccgcacgtccggacctgttgctgacaggacgtacgctgatgggacacgaagcttctaagaaccagcagttggaagaccattacttcggcgctattcctacccgtgtggcagctttcatgaaagaccttgaaatccaggcactcgaattaggtattccggtgaagacacgccataacgaggtagctcccaaccagtttgaattggctccgattttcgaggagtgtaacctggccgtagaccataacatgctcatcatgtcattgatgcggaaagtagcccgcacacacggattccgtgtactgctgcacgaaaaaccgttcaagggtgtcaatggctccggtaagcacaacaactggtcacttggtacagataccggtaccctgctgatggctccgggaaagactccggaagagaacctgcgtttcatcacgttcatcgtcaacaccctgatggctgtgtaccgccacaacggattgctgaaagcttccatcatgagcgctaccaacgcacaccgtctgggagccaacgaagcacctcctgccatcatctcttccttcttaggcagccagttgagcaaagtgcttgaccacatggaagacagttcaaccgacgaactgattgccttaggaggtaaacacggtatgaaactcgacattcctcagattccggaactgttgattgacaataccgaccgtaaccgtacttcaccatttgccttcaccggcaaccgttttgaattccgtgccgtaggttctgaggccaactgtgccagcgccatgattgccctgaacacagccgtagctgaacagcttaccgaattcaagaaagaagtagacgaactaatagagaaaggtgaaccgaagatttcagccatcattcaggtaatccgtaaatatatcaagattagcaaacccatccgcttcgacggcaacggatacagtgacgaatggaaagaagaagcagcacgccgtggtctggattgcgaaaccagctgtccggtcatcttcgaccagtatctgacagaagacagcgtacgcatgttcgaatctgccggtgtcatgacccgcaaggaactcgaagcacgcaacgaagtgaaatgggaaacctataccaagaaaatccagattgaagcccgcgttttgggcgacctggtaatgaaccacgtagttccggtagccattgaataccagagcaaactgattgacaatgtctacaagatgaagcaaatcttccctacagaagaggccgaaaaactgtctgctgaaaacatggccatcatccgtaagattgcagaacacacttcttacatcaaggaacacgtagataccatggtagaagctcgaaaagtagccaacaagattgtagacgaacgtgcaaaagccatcgaatatcacgacaagattactccgatgctggaacagattcgctaccacatcgacaagctggaactgattgtggatgatcagatgtggacattacccaaatacagagaactgctgttcatcagataatccatcccctaaaggattatctcttatttcttattggttgtttgagaaagaggctgcgaccgtgaaggtcgtggcctctgtgttttctttttggattgttagctgaaaaggcttatctttccacaatcatagcctgacaatccttttgagttaagaaaccccaaatttaatttattcagttgattaattcggctttctttccttcctttaaaaatctttttatgagtacactgttcagttaaccaatggtgtacttttctattggtatttacaaatatatggaacataattatgagtaaactgtacaaacccggcagtttgaaagaactgagggagctagtgaacaatgagactgtttgcctcggcgacatcgatacatctctaataacggatatgagttggctgttctgcgattcaaaacgtaccgacttcgacggactggaaacgtgggacacatcgcacgtcactacgatggagcgaatgttcctcagggcgaaatatttcaaccatcccataggaaactgggacgtttcgtccgtaacgaacatggaatgcatcttttgcggctgcagcaattttaatcagccgttagaggattgggacgtatcgtccgtaacaaatatggagtcgatgttcggctgctgcagcagctttaatcagccgcttaatgattgggacgtctcaaaggtccaaaaaatttcatgtatgttctgcgaagccgagaagtttaaccagccgctcgacaaatgggatacatcggaagtccgtgaaatggcgtggatgttcgccggctgcaccaaatttaatcagaatatcggcatgtgggatacatcgaacgtaataaggatggaagggatgtttgagggggcggtctgtttcaaccagccgctgaatgattgggacgtctcgaacgtgcggtatatgttacgcatgttcgacggttcaaaaagcttcaatcagccgctcgaccgctggaacgtgagccgcgtagaagatgccgaacgtatgtttaaaaacgcacgcagtttcagccagtcgctcgatatgtggctgataccgcggttctgcgacataagcaatatgttcctgtacgctccgaaattcaccgacgtcaagacgttgacgctttgcttccaccttgctaccaaaaagaactgccgcgcaaggctgaaagaaaaactggacaagctccacccggcggaagtatacacggaactctcacgctacggcagcgaacacaccgcggaatatatgcgcgaacttgaagcggcccatccggagctgataggttccgtccgcaccaatgtgggagacgtgaagtgcaagccccgctccaaacgcgagctgatagaacttctggacatgggtgcaaaaatgccgctcgccaatatcgacacatctctgataaccgacatggaaggcctcttccgaaagtctaaacgcagtaacttcgccggtatcgagacatgggatacatcaaatatagtaacgatgaagcacatgtttgccagcgcaatctacttcaaccacgacataagcagctgggatgtctctaacgtacgggatatgtcccacatgttcgaaggagcacacagatttaataagccacttgaagcctgggacgtgtcatctgttacggatatgagtttcatgttcaacgaagccgaacgctttaaccagcctttacggaaatggaacgtggtcagcgtaacagacatgagcaacatgttctcctgcgcagagcacttcaaccagccgctcgatggctggaacgtttcaaaagttcacagtatgaagtacatgttctaccgtgccttctccttcaatcagaatctgaactcgtggaatgtctccagcgttactgacatgtgctacatgttcgatatggcaaagagctttaaccagtctgtcggtgcatggaacgtatcagccgtcacaaatatgagagagatgttcgtgcgcgcatcagcatttaaccaacctctgagcgattggaatgtctcgaacgtacaaaacatgcgtgaaatgttctgcgaagcgtcgagcttcaaccagccgctgaacgactgggacgtctcaaatgtgcaagatatgcgcgagatgttctccaaagcctcgagcttcaaccagccgctgaacgattggaatgtctcgaacgtacagaatatgtactgtatgttcaacgaagcgaaaagcttcaatcagccactcgaccgctgggacatctccaatgtcaaggatatggcctatatgttctgcgaagcgacctcgttccgatatccgataacggcgtggtcactgcacaaccagtctacgcaaggtatgttcctcaggctgcctggttactgcgacatggagtcgcgcgtcatgtgtctcacccctcatgacgataaagcactgaaatacgacctggaagatatgatacaacaattcggagaaaaggcggttcatgacgcactgcggctttacggtgcccaatacggtattaaagaggattagatgaaatctaatccgtcaacactttccgacaaggattccatgtaatctaaaatcaattcctgacctcatcatatcaaaacattaattttacaatacgttgatagatagttttctgacttcgcatcactctaaaagggtgacgcgaagtcagaaaattcaaacttttaatagttcttgtttttgagatagataacagcaagtagtccaagtaatatcacaagcctatatattattaatagcctgtattgagaatgctattattatgcacagctatatgcacacttgccatttcatagtgttgaacaatctttatttttagcatctatgtcacaaaggtaatgaaaatagagacagattgatactttttgtattcttataatctcccattatcattccattccccatagagaagcccttttcgtgtattctctataaacttattcaagcggctttcaaaaagttttggctgattcctcttgatttgaatggtatcaattcttacccgtttatataaatccggtaactgacagaaattattccatactacagaatcggattgtaatctttgcaatatatccttatctatggtaaaaccttgcggtgacatgtccggcagaacggctcttccagcatctttcatcagccctaaccgttccattctgcgacatctttccttgttgagctccgaccaattacttcgtggctttcgtgggcaaagcttctgggctgttacgccatccgccattttctttgtagtgctgtctatccagccgaagcacagcgcttcttctacagcatcaatgtaccagaacgtatcatcatccacaggccttccacgcttcaccactacccagcattccgtttcctttttatggttctgcatgagccattcacgcaattcggctcttgattttgcatccagtaaattatgtatttccatctcttgttgtttcaatttgcaccttacaaattcattatctttcaagattaattattattttcaaaattcaaaaataacgaaatatcttcaatatttttgtacattgtctaactgaataccgaaaagcaatgacagagggattcaaattttacaagccatgccaattattacaagattacgtcagatattattggatatttgaaagtaatcagccgataaagacttacaccttcccaatcggttgcccccaactcatatttcataagaaatcagctttatatattccggaattaaacacaaagcaggatcgactgactattagtggacaggtgaatttctcatcccatatcagtgcagaagatagtgtcgaaatgattgtagttgtatttcatccttatgccatgagtgcttttcttaatattcccatttctgtattctacaatcaggaagtctccggttatggactggagaacaagaaattaaattgtcttgcgacgagaatttttgattgtgacgataatgacctctgtataagtcttatcgaacaatggttattctcacaactaagaaccaactttaccacaaaacgtgaagtggatataaaccggattgcggcagtcgttcatcaaatgtattctactcccaatactccaatctcagaactggcatctattgcctgcctgagcaagaaacaatttgaacgcatattttttacgacagtcgggatgaatccgaaagaatatgcacgaatcgtacgttttcagaagtcccttaagcttatgcagaatcagactgaaaatatcagtcaaacccagatagcctatcaatgcggttattcagaccaatcgcatttcataagagaattcagggaattaagcagatatacccccttatcactgataaaaatatgcgagccatattccgatttatttactactccaatataatgtctcttttattctatccgtaatcaaaggcctgttttatttttgtgctctaatttaaagtacacacaaaaatgagagaaataaaccccgccttaacgacacgtgcatacgcatacaaaatgtggatgcaggcccctatgccaatggtcacatttttcaagacacttgatgtaactaatcttgtaagaatcagtaaaaagaaaggactaaaactgaacatgctgatgtgctggtgcattggtaaagcagcttccggcatcaaggaattctatatgcttccagttggcaaaaagctgattcaatatgatacaatcgctgttaatacaattgtaacaaacaagaatggagaggtaagctcatgcgacatacctttttctgaagacctgaatcagtttaatcacaactacctccagctaaccaaacaagtggccgaaacctgtcagaaccacgatttaacggaaagcatggttattggtacttctgcgctcgtgaactacgagatagacggtgcagttggcatgtacagcggtattttcaataatccattcctgatatggggaaaattcaaaaaacgttttttcagaaaacacctgaccgtgtcatttcagtttcatcatacacaaatggacggagctcatgctgcccagttcttggaaaagcttcaacatgaaataagctcaacacacttgtaaccacaaaagtagtctgataaatcaaagaatctgcttgcacatgacgaaatttgtcagttccaactgattggctctgcacttctgtgacttaactactttgtagcccttttgttcaaagaacggttttgcagtcagactgacctccgaggtaatttcatcaactccatacgctttgcccatcttttccacttccgaaagcaacagggtagctactcccctgccctgcatatccttgtgcacaaacatggaatgtaaatacccctctttattcatagaagagaaaccagccatcttaccttgttcatcaaaggccccaatataataattttgggacaaaaggtccttccagtgggatacgtcatcaccacaagaagcccagtctactacctcttcttttgtatagtcccttaaattcacattaagcacagtagaacggaacaagtgctgcatttccagaatgtctttttcttcaagcggacgaatgttatagttaggctttaaccatttaatgactttacacggattgcccacagcaacacaatgtgctgggatagattttgtaactacacttcccgcacctattacacttccccgaccaatagtcactcctgcaaggacaatacttccaccgccaatccatacttcatcttctaccgtaataggcagggctttcgttctaaaaaacaattctccagagttttcattccagtcctccacaaaacgctcttcaaaacacacaggatgagtggctgtataaaactgtacgtgaggagctatcaaaactttactaccaatgtaaatatagttttcatccatcagcgtacaattgtcattgatgattgttttttcaccaataaaaatatgtttaccacactgacaagtaaaatttcgaccaatactggaatgttgtccgactttgcccagcatgcgaacaaacaatgcagttctttcttcttctgacaaggtgatattatcaagcattgataagagttcccttgtctgtataatcatattcaagacctcagaatccaatctattacaatactcaccagacaaaaaacgttgataattactcgcttctttcgttatatctctcaccataataaattcctcctctgtttccttcataattgtaaatccaagttttaaatacatacgaacagcataattatccttttgaacggaaagagaaacatgatgatagcctttactttccagcagtttcatcatctccttcatcaactgtctgcccatccctttattccgatattctttatataaagaaatagaaagtgaaggagtttcatcatccacatgaccataatcattcataatacgtgtccacactgccccaaccaccttaccatcatactcgacaaccaagcagcaatcatcttgtttcttgccaaagtcctgaatatatagcttcagctcaggcaaatccaccacatcccttggcagaggttcaactccttcaggaataaaaatcgcttcataaagaaaatccctcaacaaatggatttcctctggatacaaaggacgaataatatagtctaccacactatccatagtttcaatgattcattttttcccactcttcttttgtcaacaaagtaaaatgttctgtccgcacatcacccaatggagaaggtttgccctcttccgtatgatgaaacttgaaaccacatttatccattactcggcgagatttggtattcccgtcataataaccacaccacactcgttttactcccagttcctcaaaacaacgcctcaacaggcgattgacggcctccggaatcagcccctttccccaataagggactccaatccaataacctatctctgcatctccttcctgcatgtcagcgctgtgtacgctgtctccaaacataatgcccacactgccaacaggttcatcggcttctttcaacactaccgcataagtttccggtgctgaaagaatatcacgtatcacctctcggctgttttctacagacgtgtgcggtggccaaccggcaatcggccctacagccgggtttttggcatatttatagagtggaagggcatcttcctcacgccacggtctgagtatcagtctttctgtttccataattatgtgcggtatattttattttttatacattgcaagattagctatcatctttttcaaattagcttcattttcctcatccgaaatggaagggtctttcataaaacgaccacaaggtaaatccggacatcctccacagttttcccgcttttgttccttacagcatttccagatgggacataccgcatcgcctgtatactgaagccagaacaccttaccttttatctttctgcatccattgcattcctttgggaatgacgcacagtccacacacctagctccacacggagagggataaaaataatcatctttccaataccaccatttacatttctctctatccgggttttccgtatgaacaaaatactctaaagcccggtacagataaagctggcatcggtctatcgtacacccacgcaaacggcattcctcctcatacaaatcctctgctttctttcctttcagtgatgcgatagaggtataccccatggctatcaggtcttgttcagtctgtgaacctacgttagggatttttcgtaaagatgatttttcttgattgtcagtcatatcttattttttaaagttcttatatacaaacatcggtgaacacaaagtactcaatagcaccaatatccacagatttccggtcataggattatatgcttgacataattctttccaagaagaaccggatgacaatcccagtccaaattcaaaacaaaccgtaagacacatccataatcctcctacaagaatacaatcttttttcgtcaagtctttaataggtggtaaaagcaaaaatgttaccacataaattaatcctgcaagtaatacaccgcttaatgccaaagctgtgctttcagacaagaaacgatgccatacatattcacgaagtcctccatttaaaatagccagtgggataaaacagcaccatactcctattactttactccatttcatcatttttctttctcagcgattcgactactttcattgcatttctcctggctgctacgatacttggcgtcatttcgtattccagcatatcaagacaggccgccagttcatttgccagctccggaacaaaccggcacatctttgcagccagttttatcatcatcgagcggctgctgtccgattcctttttgtcgacagcatgggcaagacaaaaatcaaacaagcctgtcctgaagttctgcttcgtagacaactctatcaaaatagatagaacaagtccccgacgtatatgcaaacaaggcttcattgcccagtctgcaatcttatcataaaagggagagacataaagtcttttgtcttctgctgataaataatacagtatccatgccgcattgtatgccgactgtgcatcttccgcataaagcataaggtcacacatcttaccgatgccagcctcatcatgatgcaactcgcgagacaaagccattacctgccatttggacagcctatcctgcaaatgttccatttcgttttactatgtttctacactataacggcaaatctaaagaataagaaatagaataacaaatgaaaaatgaattcttttaatgatgagtcctatccatatttttatatttttgtattttatcaagctaacttttaaacatcatgagaatcaaacaaattacactttattaatactataactttcacttcttgcataggcaaacaaacaaaaaattaataactggctgcgataaaaaatgtccatcatatacgattagctaaaaaagatatttgatttctttttgcaaacgaattaataatatagaatttaataagaacagacaacatgagtgatttcataattataatattcctttttccaatctttttcatgatacatgagtttgaagaaataatcatgatacaaaaatggataaatcataatcaaatcaaattaactcaacgattcccccatttatacccaataataaagaaagcatcaaagattgatacacataaattttctataattgttgctgaagaatttatcattgtgtccacatgttgtactatcagtatatatacagggcaaatcatctactggtattgttgtcttgcggcattcagcttacatctcctcattcatttattgcaatttatcatttggcaaaaatatatacctgcaattgtaacaaccttatgctgtcttccatattgtatttgggctatatacaataccatccatatattaccatttcaattattagttttttatgcatttattggttttataattgggggtgtaaatctactgataatgcataaaattatgatataatttactctgtctaaatttaaatctatccctcacatattgacttgtcaacttagtcaggaattaatcttcaaactgacaactattttcagtacacttcaaacctcaaaaaacgcaagtacatttcaactcaaacgcctaagcgttttaagtaaaacgtacttgcgtttgaatccaaacgcacttgtgttttctatcaaacgtaagtacgtttttcccctgtgcttaaaaagccccaaattttctttatttattcagaaaatatacatttaaaggcagttttttagtatcttcgctccaaactaacctgactaacctatgtctgtactccgatatttcatcattatagggatacttgccgtgggagtatacgttttttcgtgtacctccccaactgaagcaccttcccctgaatctacagaaataaatactcataccgatagcctgttgcagttcaggatttatcttgaacaggcccgcatcagccgttttaaaggagagaatcaggaagaagctcatttcttagatgctgcggaaaacatcgctcaatgtctgaacgactcgtccgtatatgcaaacttatggcaggagaaagccatgctttacctgccgcatcaaccggaaaaagccaaagaattctttcagaaagcacttgcctatatgccttccggcactccggtctccatcgcacagagtgaactttacctttcccgcatttatttggaacaaggacagacggacagtgccttccattacatcaacaacgccatctgccaaaatttgccgagaaaggaaactgccgccttacaccttcagaagggctacatttttgcctttcttctgcaagctgactcggccacgcatcacatcctgccttttttacctgatgcctccttaaaacaacgcacagaagcttaccgtcgtctattcgaaatgtacggaaagaaacagaatgagaaacaggaaaacatctacatgcgaaaatacattctgtcgcatgactcgctgagtgccgaacgaaaggaaatggtcatcgaaaagatacaagatatgcacgaatacaagttgcaacgcgaacgggccaacaaagcggagatgcaggcagcgcaccacaagctggttttctaccggattgcggtcaccttaggcgtggtgattcttatcctgcttttacttcttcaccgcatccgcgtgcacaagcaaaagctgacagaagaactaaaggctacccagtggatgcgcatggaagaaacactgaaaaggaaagaagcggaagtggcactggcccacgaacaggaaaaattgaaacagcaggaaattgaccggctgaataaaagcgtagcatactaccggcaactgaatgccatcacgcttccttctctgttgcggaaaaggaactcgcaaggtgcacttcacctgacggaagaggaatgggacattattcagcaaaacacagacacttgcttcgacggatttaccagacgactgaaggagtgttacccgcaacttacggaagaggaacttcgtttctgctgtctggtaaagatggatcttcccatgtcgttactatccgaaatttaccatattgccaaaggaagtatctcgcgccggaaaatgagactgaaggagaaaatgcacatcgaaaacagcagttttgacgagtttatcaccgcattttaagtgttatgtacatcataaaaattatcaactatctaatttccaatagattaaattttatttgtgtacatcagatttttccctgacttccatctgttcactttacctttgcagccgtaaatctatttaaacatacgcgactcatgaaagtgaaacaactactttatgggatgatgtacggcttattgattttcttcactgtatcttgcagtgaagaaaattcagaaaatctacccgataatgtagctatttatcaaagctacctggtagctttttctgattcacagcctaccctgacctacgcccgtttctctccagagaaagacgtacccctgaaagaaatcaaactgacaggcggagcatccatcatggccaatggcaaagagatggaataccattattttgatggaaatacaatattcggttattcctattcactggcactcggaaaagacgaacaagtctcattcgtattccaacgcaaacggcagcaagaaacccgtatgctgaccaattatgcctacaaggaatggattaatgagatacatattccttcggaacttatcacgattaccaatcaggaagtggttggatggaagggtgagaaaatcgcgtccaatgaagaactggaggccacgctggacagcccctcacatttggaagaatataccgcttattatggtacattgaacgaaagccgtgacggaatttcgtttaagaatgtgccgaaaggaaaatatatgcttacgctgaaacgcatcctgaaactggaaaccaaagacaatgacgctcccgccaaaggagaaatcagactggttttctacgacaaaaaagaagtaacggtgaaataacaagacatagcttaaaatgagaggaatttttgtaatcattttgctaatctgtagcttgtcagtgtacggtcagactgaaaagcgcccactttggaagatacaactggagggcgcactggacaattacaacagatgggaagtagagccgtctgtcactttccagcccttcaagtatgccggcatcggaatcagctttctttttagcaaaagcctggatggcatccatctcaacggagtctcggctgacaaaaaattccgctttgaattgaacgatgaaaaggttctgtccacccacctcgcatgcagaattgcgccacaattctacacgccttcgtggatattaggacatgaccaggaatatgccttgtacctgacattcagtccgggcatcacttgttcgtttccacccactaaacatataaccctggcctatttcccaaactccacaggtgtatggactccccaccactatgaagaaatcacaacttcccgtgcggagcctttatcctttcagctgaaaacttccgtttcgttggaaatagaagaaagcctgataatctctctgggatacaccctctctaaccttgacccttactcgggcgtccgggaaaccgttttcgacggaaacatgctgaatctcggaaagaagcgcccattttttcattcactctcgatcgggataggctggcggttttaaaaactgggtcggattaacgtccggcccagttttttattctattcatagcttcctggcaatcctcacgtttgccaaaggctgtcagtcgcaggaatccttctccgcttggtccaaatccaactcccggagttcccaccacattgacctcgtgaagcaacatttcaaagaagttccatgaatccagcccttcgggtgcctttacccagatataaggcgcattcactcctccatagagtgtaaatccagcagacagcagtccttcacgcatcagacgggcattctccatataataggatatggtttccttaatctcagcttgcccttcggcggtatagatggcctctgcccctcgctgggtgatatagctggtaccattgaacttcgtacactgccggcggttccacaaatgattcaaagctacttgctcgcccgaagccgtcatggctttcacttcttccggcactacggtataaccgcaacgcactccagtaaaaccggctgtcttggagaagctacggaattctacggcacacgaacgagctccctctatttcataaatagaatgtggcacatcactctcacaaatgtaagcctcataagccgcatcatataatatcagtgccttatgtgccagtgcatagtccacccacttctgcaattcggctttggtcagcgtcgttcccgtaggattattagggtagcacaagtaaatcatgtctaccgattcttggggaagagacgggataaaatggttttctgccgtacaaggcagataagtcagacgattccattgtccgttcgcctgcaattctccagctctcccggccatgacgttactgtcaatatacaccggatacacggggtctgttaccgcaactttattgcctgtgcctaaaatatctccaaaattaccggtgtcacttttagctccgtcactcacaaaaatttctgtcggacgcaattctactccacgcgagcggtaatcatgttccagaatagcctgaatcaagaaatcatatccttgttcaggaccgtatccatggaaagttccggcatcggccagttcgtctaccgcacggtgcatagccttgatagaagccggcggaagcggacgagtcacgtcgccaattcctaatcggataagtgcagcttccggatgagccgatttaaaggcattcacttttttagcaatgctcgaaaacagatagtttccgggcaacttgatgaaattatcgtttacttgtatcatatatcttgtcttactcttttaattcgattgttccgtcaaatactttcactgcgggccctatcatatacaaatgctgcccctctcctgcccagtcgatggtcaggtcacctccatccatacagattgttgcatgggagccgcattgtccggaaaaggctgctgccacagcggtagcacatgctcccgtaccacaagcttgtgtgataccggatcctctttcccatacccgcatgcgtatgttttctttgtccaatacttgagcgaactctacgtttacccgatccgggaaaagtggatgacgttcaagcactggtcctacttcagcaagagctacctcctccattttatctacaaaaataaccagatgagggttccccattgacacggccactcctttctggaagggataagcatcgcccaaatccacccagtgaatatcggcaggaattcccatatccacccgaacagactctacctttccctccttcacctgcaaatgcagttccttgataccggaaagcgtatccagcagaatatccgtcttcgtagtcagtccatattcatacaaatacttcccgatacagcgactggcatttccgcacatcttggcctcagaaccgtccgcgttaaaaatacgcatgctgaaatcagccttgtccgaatcgccaatcagcaccagtccgtcactgcctatccccgtatgaggacgactccaggctatggacttttcttccagattagtcagcgggtatttcatcgtattcacatagatgtaatcattacccagaccatgcatttttgtaaattctattttcatatctgataatcagtttagtttttgtatccctcctcatgtacatcggttaccgcacgtccgctcggctcattgatatgctggaaagctttatcccaagccagtgcctcagctgtagaacaagccacactcggtacactgggaacactcttagccgcactttcactcgggaaatgctcctcaaagatagagcggtagtagtactcttccttgttacggggaggattcaccgggaaacgttcagccgcatgcaccatctgttcgtcggatacctcttttgccgtgaattccttcagcgtatcaatccagctgtatcccacaccgtcactgaactgttccttctgacgccatgccacgctttcaggcaacaagtcggcaaaagcttcgcgtacgattttcttttcgatggtttttccgggacacatcttggcttccgggttcaaccgcatggccacatccaagaattccttgtcaaggaacggcacacgtccttctactccccaggcagccaatgatttattggcccgcaaacaatcgtacaaataaagtttggacaatttacgcacagtttcttcatggaaagcccgtgcatcgggggccttgtggaagtacagataaccaccaaaaatttcatctgctccttctccgctaagcaccatcttgatacccatactcttgatgacacgagccagcaagtacataggtgtagaagctcgaactgtcgttacatcgtaagtctcaatgtaataaatcacatcgcgaagtgcgtcgagaccttcctgaatggtgtagtgaatttcatggtgcacggtaccgatgaaatcagccacttcacgtgccttggccaaatcgggggctccctccagaccaatagcaaaggaatgaagctgaggccaccatgccgccatctttccatccgtttccacacgacgggctgcataacgcttggcaatggcagaaatgactgagctgtccaaacctcctgaaagcaatacaccgtagggtacatcactcatcagttgctcacgtacagctttttccaagccttcccgcaaagcgctaaccgatgccggtgcatcagctactgcctcatactgagtccagtcgcgaacgtaccagcgggtcatcttcccgtccttgctataataacaatgtccgggtaaaaagggttcatagcgttcacaaaaaccttccaacgctttcagttcgctggcacaatagactttgccatcgctgtcataaccaatataaagtggaatcaccccgatagggtcgcgagcgatgagaaactcatctttttctgaatcgtacagcgcgaatgcaaaaataccattcagcttttccagaaaatgtattccgtattcttgataaagtgccaagattacttcacagtcacttcctgtctggaaatcatattttccggcatactccttacgaatctcacggtgattgtagatttcgccgttcacggccagtaccactttcttatcgggtgagtacaatggctgtccgccactctgcgggtctactatcgacaaacgttcatgcgctaagatagccaatcctccacaataaattccactccagtcgggaccacgatgacgaatctttcgagccatggccaatgctttttcacgcaactctggagtctgttttctgatatttaaaatagctgcaatgccacacataatcgtaaagttgtatttatattttgtatgtaatcaattattttcggcttaaatatgcatcaatgtcggctgcggccttccgaccgcctgcaatgcacttcacaaccagactggctccggtagctgcatcaccggccacaaagacattcgccgggaattctggttgtaccggacgaaggaatcccatcgccagcaataccaaatcggctttcaggacttctttcttcccagtcggcttcatcaccggacgttctccttcggctcccggagtccattctacttcttccacttctacaccgcacactttcccgtcttcttccaggaagcggttggaagtcagactccaccgacgtatacagccttcttcgtgactgctactggttttgagaaccaccggccactgtggccacggagtattcggattataacctacaggaggcttcggcataatttcaatctgcgttacactgagtgctccctgacggttacttgttccgatacagtcactacccgtatctccacctccaattaccagcacatgcttgccttttgccgtgatacgttcctcctctggaatacgctgtccggccagcacgcggttctgctgtgccagcatctccatggcaaaatgaatacctttcagttcacgcccggggatattcaaatcgcgtgcctgcggcgtacccgtacaaatgcagtatgcatcaaatccttcgggaaggtttgtcacgtcaatatcggcattgaccttgaaagtgattccttctgcttccatcactgccacacggcggtcgattaccgacttgctgagtttaaaattcggaataccaaaccgcaacaagcctcccacgtattccagtttttcgaacaccgtcaccgcatatcctctgcggttcaactgattggcggcagccagtcctgcaggtccggaaccgatgacagccacagattttccgtttcgttcatattgacgaggctgtacgtacccttcacgaaaagcagcttcaatgatggcagcttcatcttcacgaatggttaccggtgcatccatactcaacttcaacacacaactcttttcacacaatgccggacatatacggccggtgaactccggaaaatcattggttccggtaagtatctcataagcttctttccattttcccttgtacatggcatcctggaattccggaggacgattccccaacggacatgcccaatggcagaaaggtaccccacagtccatacaccgcgatgcctggagctttcgctcgcttgtgttcaacgtctgttccacttcactgaagtccatgatacggtcgtgtaccggacggtatccggcctcttgtctgggaacggtcagaaatgcttttggatttcccatatatctagttttttactgttcaacaattaatcaataatcacgttgtacttcggctatcttctgctgcagtttgcgcatctgctcttcagccagcactttcttgtattcaatcggagttacctgaatgaattcttccacataacggctccagttatccaacatcgtacgtgccagttgagaaccggtgtacagataatgctgacgaaccagttcatgcagttccttgcgggctgtagcatcttccaacagagaaagttctaccatttccatgttacagaagtaatcgaagttacggtctttatcccatacgtaagcaactcccccactcatacctgcagcaaagttacgtccggtcttacccagtacgactactcgtccaccggtcatgtactcacagcaatggtcgcctactccttctactactgcaatggctccggagttacgtacagcaaaacgctcacctacgcaaccattgatataaacctctccacttgtggcgccatacagcaacgtattacctgcgattacgttgttttcggccaagaaattgcttcttaccggaggctgtaccgaaatatgtcctccactcaagcctttacccaggtagtcgttcgcttcaccttccagcttgaagctgaccccatgcggaaggaaagcaccgaaactctgtccggctgaacctttgaacttcacctggatggtctgtgcgggcaatccagcctgtccatacttggcagctacggctccagaaagcatggctcctaccgaacgatcggtattggatatggcatattccaacgatacctccttacggttttccagtgcttcgcgtgcggcagccagcatactgacatccttcacgtgctctatctcatgacgctgttccgttacattatgtaaggcagctccgttatcgactttgtgcaacaatttactgaaatcgagcaatgaagccttttcatgagttgtcggacgtatttcaatcaaatccgtacgtcctacaatgtcttccagacgggagaatcccatctctgccaggtattcacgtacctcttgtgccaggaaacggaagaagttgactacataacggtaatgtccgcggaaatgtgcccgcaactgcggatcctgcgtagctaccccgacagggcatgtattggcatgacatttacgcatcatgacacatcccaaaacaatcaatacagaagttccgaatccaaactcttcagctcccagcaaagccatgctgatgatgtcacgtccagtcttcaactgtccgtcagtctgcaaacgtacctgaccacggagtccgttgagtaccagtgtctgctgtgtctcgctcagaccgatttccggagaaataccggcatagcgcatggaagaggccggagaagctcctgttccaccttctgctcctgaaatgacaatcaaatcagcctttgcttttgccacaccggctgcaatggtaccaataccactttcagctaccagtttcacactgattttggctttcggattcacgttcttcaaatcgaatatcagctgagccaagtcttcgattgaataaatatcgtgatgagggggaggcgaaatcaacgaaatgcccggaatagaatgacgcgtcttggcaatgacttcattcaccttgaatcccggaagctgtccaccttcacccggtttagcaccctgcgctaccttaatctgaatttcttcagcattcaccaagtattcagtggttacaccgaaacgtccggaagctacctgtttggtcttactgcacaaggaaatgccatcgtaggtttcatggaaacggtcggaatcctctcctccttcacccgtattactgcgggcgttcagcttgttcatggccagtgccatggcttcatgcgcctctttactgatagaaccaaaagacatggcgcctgttacaaaatgctttacaatttcctctaccggctctacatcttccaatggaatcggattacggcggaaggagaagaaatcacgcaagaatatcggactttccttttcatctacccgacgcgtatattccttgaacttggcataacttcccaaacgagtggccaactgcaaagcactgatagtttccggattccacgcatgcttctcgccatccttacggtaggagaactggccgatataaggcaacaaatcgtcgacctcttttgcaaaacctgcatcatggaatgcctgataatctttggcaatgctttccaatccgacacctccaatggatgaagaaggggtaccgaagtaagtagaaagcacttcgctgcccaaaccaacggcttcaaaaatcttcgctccacggtaagaacgtatcgtactgatacccatcttactcattactttatagagtcctttgcaaacggcttttatgtagttcttttcggcagtttcataattcaactgcacatcgcctttcttcaccatgtcatccagaatggcaaataccatatacggattgatggcgctcgctccatatcccagcaacaaggcagcgtgcatcacttcccgaatttctccactttctaccaccaatgcggtctgtactctcttttgtacagaaatcaggtgatgatgtacagcacttacagccagcaaagaaggaatggctgcatgtgctgcatcaatctcacgatcggaaagaatgatgtagtttaccccttcatccactgccgcctcggctttcttgcacaactcattcaatgcctcacgcagaccttccgctcctcttgctgcgtcgaacagcatcggtagcttcacggtattgaaccctttatagcgaatgttgcacaatatatcaagctgtgtattgttcagaatcgggtgtggcagacgtaccatcttacaatgtgattcactcggcaacaagatgttggttcctacggctccgatatattccgtcagcgacatcaccagttcctcacgtatcgggtcgattggcggattggtcacctgcgcaaactgttgacggaaataattgaacaatatctgaggcttatcggacaacacggccaaaggagtatcgttacccatggaggcagtgggttcggccccattcatacacatcggagtaagtgtacgttctatgtcttcgcgagtaaatccgaatgcacgcaagcgacgttcataatcaggtacagaattggaaatcttacgtccactgcgtaatgtatccagttcaatacggttggtagaaagccactgacgataaggcttggaagccgccaactggctcttcagttcgccatcgtagtaaatacgtccttcctgggtatctaccaacaatatcttgccaggctgaagacggcctttttccttaatggcttcaggttcaaaattaataactccagcttcgctggctaccaccatcatatcatttttggtaatcaggtaacgtgccggacgcaaaccgttacggtcgagcataccacctgcataacgtccgtcactgaacaacaaggcagccggtccgtcccaaggttccatcaaaatggaatggtactcataaaacgccttcagctcctcactaatcggattcttgtcattgaacgactctggcacaagcatagccatggcatgcggcaggctcaatcctgacatcacgaaaaactccaacacattatcgagtgaggcactgtcgctcattcccggctgtataatcggacctattttcttcacgtcacctaataaaggagtggaaagtacactttcacgcgcctccatccatcctctgtttccacgaatggtattgatttctccattatgggctaacaagcggaaaggctgtgccaaactccaggtaggaaatgtattcgtactaaaacgagaatgtacgatggccagtccgctggtaaagtaaggctgggtaaggtcctgaaaatattcacgcacctgtaccgaagacagcatacctttatatataatatttttactggacaaggaaacaatgtaaaagtccttatgatgtacacggcgttcaatctttttacgtacaatatataaggtacgttcaaagttttccaggtcggttgccccggtaatgaacacctgcttaatgtctggttcagtctccaacgcacttttccctaagatagaagaattcacgggcacggaacgcaagtgcatcaatgacaatccttcacgctctacctcctcaatcaggatgctcagaatggactcctgttccttcgcgtctttcggaagaaaaaccaatcccgtaccatatttccccttttcaggcaccggaattccttgtaacaatataaactcatgtggaatctgcagcataatacctgcaccgtcacccgtcttgttgtcagcgccttctgcgccacgatgtttcatattttccaagactttcaaggctgcatccaccaattcatgtgatttattaccatgaatgtctacaatcatacctactccacaagcatcgtgctcgtactccggttgataaagcccggaagatgtctgatgacattctgttacttcctgctcttcttttctcataaattttcctgctaacctcattttatctttcattattaatacccaaaacagagtttacattctatttgtccacaaaaataataatatcacttccaatatgacacttttgtaggatttttcattacaatattttcatctacacaaaccgaagctttcattttctttatatagcaagtagaaaagtttcagaataaaacagaataaatacattttgattacatttatcacaaaaagacagaaacaatgtattttttcaggcacagcacatacctcttttaataattgtctgttattttgtaaacgaaaatcataatatggcttgaaaacaaaatacagatggaaacattaaaacatgaatgcggagtcgctcttatccggctcctgaaaccactggaatattatcaggaaaaatatggtacatggatgtatggcttgaacaagctttatctgctgatggaaaagcagcacaacagaggacaagaagctgcaggattagcctgcgtaaaactgcaagccaaccctggtgaggaatacatgttccgtgaaagaggactcggagcgggagccattacagaaatcttcaacaacgttcatcaacaatacaaagatttaacggaagaacagttgcacgatgctgaatttgcaaagaagtgcctgccctttgccggagaactttacatgggacacctgcgttattcgaccactggaaaaagtggtatctcgtatgttcatccatttctccgccgcaacaactggcgtgccaagaacctggcattgtgcggtaacttcaatctgaccaatgtagacgaaatctttgccgatattactgaagccggacaacatccccgtaaatacgcagatacctatatcatgctggagcaggtaggccaccggctggacagagaagtggagcgcctttacaaccagtgcaaagaagaaggcttgaagggaatggacatcacgcatgccattgaagaccggattgacctgacaaacgtactgaaaacatcttccccatcctgggatggaggttacgtcatctgcggaatgacaggaagcggtgaaacctttgccgtacgcgacccatggggcatccgcccggcgttctggtatcaggacgatgaaatcatggtattagcttcggaacgccctgtcattcagacggtattgaatatccctgccgaaagcatccatgaactgatgccaggacaagctgtattggtcaataagaaaggtcaactcagactggcacaaatcaacaaacccggaaaattaaaaccctgttctttcgaacgcatctactttagccggggaagtgacgtggatatctaccgggaacgtaaaaaattaggagaaaaactgattgaaccgattctctcagcagtcaatcatgacattgcccattccgtattctcattcattcccaatacagccgaagtggctttctatggaatgctggaaggactggacaattacctgaaccaacttaaaatcaagcaaatcgaggccttgggtcacacacccagtcatgaagaactgaaacagattctttctcaacgcatccgaagcgagaaggtagccatcaaggatattaagttgcgtacctttattgcagaaggaaatacccgtaacgacctggcagcccacgtatatgatattacctacggaagcctcgtgccacaggaagacaacctggtaatcatcgacgacagcatcgtacgaggaacgactttgaagcaaagtatcatcagcattctcgaccgtctgcaacccaaaaagattgtcatcgtatcctcttccccacaagtccgctatccggattactatggcatcgacatggccagcatggagcaattcatcgctttcaaggctgccatcgctctgctggaagaacgcgacatgcagcacgtcattgaatacgcctatagaaagtcaaaagaacagctgaacctgcctaaagaaaaaatgcgcaactacgtaaaggaaatttatgctcctttcagcgatgaagaaatatcagaaaagattgctgccttactgactcctgccactacgcgggcaaaagtacagattgtttaccaaacgttggaaggactgcatgaggcatgtccggcccatccgggagactggtattttagtggagactatcctaccccgggaggaacacgccaggtgaaccaggcattcatcgactgggtggaaaagaattatcaattctaattttccctccccaaaaacaaacagaagtcaaagtttccagtactcccgaagaagtactgtagtactgcctatgaagtactccagtactttcacgggaggactgtagtacttctttgaaagtactgagaattgtgacttttcctaatataaccatacgttttttctttttataaactggaacagtagacacattgcatacagtcatcctaaaataatagactattaagcaaaagttgtgctgtttttacagctgaaagttccggacaattcccctctttacaaattatcaaatcgagaatctatacctgaaaagcaaaccaacaaatccccacctttgacgaaccagaagagattcaaaaaaacttaatcaaaagatgaatttttgacaactccagtttgcaatattatgaagtattcgtatatttgcagcctagaaacagaattcatggaagcattttacagaacacataattatttggttgaacataccaacgctcctgttcgccgtgatctcatggatgaaatagactggaatgatcgcttgattggtataaaaggtacaagaggggtaggcaaaaccacatttcttttacaatatgcaaaagaaaaattcgggactgaccgttcctgcttgttcgtaaacatgaataatttctacttttcacaatacagtttagtagactttgccggggaatttgttaaaagagggggaaaagtcctgcttattgaccaggttttcaagcttccagactggagtcatgatttgcgtacatgctacgaacgttatccgcaactgaaaattgtatttaccggttcttctgtaatgcgtctgaaagatgagaatcccgaactgaacgggattgtcaaatcgtataacctgagaggattttctttccgtgaatttctgaacttacagacaggaaaccatttttcagcttatacgttggatgagattctgcacaatcacgagcatattgtgaaaacaatcttaccacacatcaacccgctcaattattttcaggattatattcatcatggcttctatccttttttccttgaaaaaagaaatttctcggagaatctgctgaagaccatgaacatgatgattgaggtggacattctgctgattaaacaaatcgaactgaaatatctgtccaaaatcaaaaaattattatatttgctagcggtagatggtcctgtggctcctaatgtcagtcaattggctaatgaaattcagacatcacgtgccacagtcatgaactacataaaatacctggcagatgcacgactcatcaacatggtttatccgaaaggggaaagtttccctaaaaagccggctaaaatcatgatgcacaacacaaacctgatgtatagcatctatccggtaaaagtggaggaacaagatgtgctggaaaccttttttgtcaataccttgtggaaagaccacaaaatcaacaaaggcgataaaggtacctctttccttgtagacaatacgctgcatttccggatttgtgcagaaggaagcaaatataaaagcaatccgaacatatactatgccatgcataaaatggaaataggacacggcgaccagatacctttatggttatttggatttttatattgacaataacgattttattacttcatatttaattagtaattgtatgactaaacaaaaaaaattcatcacttgtgatggtaaccaggctgcagcacatatttcatatatgttctcagaagttgcagctatctatcctatcaccccgtcatctacaatggctgaatatgtagacgaatgggctgccgcaggtcgtaaaaacatcttcggcgaaactgttttggttcaggaaatgcaatctgaaggtggtgctgccggtgcagtacacggttctcttcaggctggtgcattgacaactacttatactgcttctcagggtcttctgttgatgattcctaacatgtacaaaattgcaggtgagttcttgccatgcgtattccacgtttctgcacgtacactggcttctcacgcattgtgtatcttcggtgaccaccaggacgtaatgtcttgccgtcagacaggtttcgctatgctttgtgaaggttctgtacaggaagttatggatttggccggtgttgctcacttgtcaacaatcaagtctcgtgttccgttcttgaacttcttcgacggtttccgtacatcacacgaaatccagaagattgaaatgctggaaaacgaagacctcgctccgctggtagaccagaaagctttagctgaattccgcgaacgtgcactcagccctaacaaaccggttgcacgcggtatggctgaaaacccggatcacttcttccagcacagagaatcttgcaatccgttctatgaagcagttcctgctatcgtagaagaatatatgaacgaaatcaataagattacaggacgtcactacggcttgttcaactactatggtgcagaagatgctgaacgcgtaatcatcgctatgggttctgtaactgaagctgctcgtgaagctatcgaccacttggtagcaaacggcgaaaaagttggtttggtttctgtacatttgtatcgtccgttctctgctaaacatttcttggctgctgtacctaagactgcaaaacgcatcgcagttcttgaccgtacaaaagaaccgggtgcaaacggcgaacctttgtatcttgacgtaaaagactgcttctacggacaggaaaatgctcctcttatcgtaggcggacgttatggtctgggttctaaggatactactcctgctcagattctttctgtatacgaaaacttggcattgccgactcctaagaaccacttcactatcggtatcgtagatgacgttaccttcacttctcttcctcagaaagaagaaatcgctttgggtggcgaaggtatgttcgaagctaaattctacggtctgggtgctgacggtactgtaggtgctaacaagaactctgtaaaaatcatcggtgacaacaccaacaaatactgccaggcttacttctcatacgactctaagaaatctggtggtttcacttgctctcacttgcgtttcggtgatcatcctatccgctctacttacttggtaactactcctaacttcgtagcttgccacgtacaggcttacctgcacatgtatgatgtaactcgtggtctgcgtaagaacggtacattcttgctgaacactatctgggaaggcgaagaactggctaagaacctgccgaacaaagtgaagaaatacttcgcagaaaacaacatcactgtttactatatcaatgcaactaagattgctcaggaaattggtttgggtaaccgtactaacactatcctgcagtctgcattcttccgtatcactggcgtaattccagttgacctggctgtagaacagatgaagaaattcatcgtgaagtcttacggcaagaagggtgaagacgtggttaacaagaactacgctgccgttgaccgtggtggtgaatacaaacaattgactgttgacccggcatgggctaacctggaagttgaagctgctgctgcaaacaacgatccggcattcatcaacgaagttgttcgtcctatcaacgctcaggatggtgacttgctgccagtatctgcattcaagggtatcgaagacggtacatggcatcagggtacagctaaatacgaaaaacgtggtgtagctgcattcgttccggaatggaatcctgaaacttgtatccagtgtaacaagtgtgcatacgtttgtcctcacgctgctatccgtccgttcgtactggatgctgaagaacaagctggtgctaacttcccgactctgaaagctgtaggaaaacagttcgacggtatgacattccgtgtacaggtagacgttatggactgcttgggttgcggtaactgtgctgacgtttgtccgggcaacccgaagaagggtggcaaggctttgactatgaagccgcttgaaactcagttggctgaagctgctaactggacttactgcgctgacaacgtgaagtctaaacagcacttggtagacatcaaggctaacgtgaagaactctcagttcgctcagccgttgttcgagttctctggagcttgctctggttgtggtgaaactccgtatgtgaaactgatttctcagttgttcggtgaccgtgaaatggttgctaacgctacaggatgttcttctatctactctggttcagttccttcaactccttatacaactaacgaaaaaggtcagggtcctgcttgggctaactcattgttcgaagacttctgcgaattcggtttaggtatggaattggctaacaagaaactgcgcaaccgtctggaagaagctatgaagtctgctatcgcaaacgaagctactccggcagaatacaaagaagcattccaggaatggattgacggccgcaacgatgctgataagagcaaagctgctgctgaaaagattattccgttggtagaagctgcaaaagacaagtgtgctgcttgcgctactatcgctgaattcaaagactatctggtaaaacgctcacagtggatcatcggtggtgacggtgcttcttacgatataggttacggaggtcttgaccatgtaatcgcttctggcgaagatgtaaacatcctggtattggatactgaagtttactctaacactggtggtcagtcttctaaggctactccgctgggtgctatcgctaagtttgctgcttctggtaaacgtgttcgcaagaaagacctgggtatgattgctactacttacggttacgtttacgtagctcagattgcaatgggtgctgaccaggctcagactttgaaagctatccgcgaagctgaagcatatcctggaccatcattggttatcgcatacgctccatgtatcaaccacggtttgaaagctggtatgggtaaatctcaggctgaagaagctaaggctgtagaatgtggttactggcacttgtggcgcttcaacccggctctggaagaagaaggtaagaatccgttctcactcgactctaaagaaccgaactgggaaggcttccaggattatctgaagggtgaagttcgtttcgcatctgtaatgaaacaatacccgacagaagctgctgacttgttcgctgcttgcgaagacatggctaagaaacgctatgcttcttacaagcgtatggctgcaatggactggagcgacgaaaaagctgaataatttattttagcatataatcaacgaaaaacggctgcctgcaaaggtggccgtttttttgattacaagctttttcttatgtttgcattgaattatcaataacgaaaagctttatgaaatacttaattgtttccgacatacacggatgccttcctgcattagaaaaagtcctgcagttttaccaggcacatcactttgatatgctcattattttgggagatatattgaattacgggccacgtaacggacttcctgagggactcaatccaaaaggtattgcagagaaactaaatgaaatggcaggagaaatcgtagcaatacgaggaaattgtgattctgaagtagaccagatgttgctgaacttccctattttatcagattacacattaatcgtagataatggcaagaagttattcctcacccacgggcacatctacaatgaagaaaaacgcccgcaaaatggatatgatgcctttttctacggacatacccatttatggaaactggaaagaacggcaaacggcatcatctgtaacacgggctccattactttccccaaaggaggcaaccctcccacttttgctagctatgaaaatgggaaaatcactatataccatctaaatggcgaaatactgaaagaacttccactataacaaccaaaagggcataaaaaaggctgccaacctatcgtaacccataacagacaatacatacattacgattcggaaggcagccactccccatcttattgaattatagcaatagacaagatatattacagttcagaaaatggctttggttttccacccaaagggaaagaaattcccaagaaaccattcactgatttagaattacctccaaagaacatatagtcggttcctacaaacaacggacccaacttcaccgctagaccaattgacttaccacttgcttgaatcggagagtaactaatagctgcattcagccagttctttggacggaatgtggccaagaaagtcaattcattcaatgttttgggctctgcaaaacgagcggtgtacatagcacctacactcaacttattattcaacaatccatattctccagccaataacagtgtagaatacaaacgggtttttgtttttaccttttcaggtgaaccttcttcaaaatcaaaacgttcgaacgacaagaaatcaccgccaatataacgatcataattctctgaattaatggtcacttcatctcctccactcaccgtagctacagttgtttcgctttccttccatttcaggaaacctaaatcgagaatagaagctgatacggtcaggttatcccatactttataacttgctcctaaatcaataccaaaacctgaacctgcaatacctaagtcgcctgcatccaagtcaaagttatcaatcattccattgttatcaaaagtcatacctccacctttcaaggtagtaattacgttaccattcgcagaataatcgtaatgtgctccataccaatcagaaggagaaagttcgccacgagactcataatctgcataatttgtatattgaggattcggaacatccaaattcaaatcaaactgattgatgttcatttctgcacgagccagacctaacaacacttttacacgtccacctacagtcaatttttctgtaatacggcgtgagtatcccaaaccaacttcagcgtatgccttcatgttcagtgtctgatttgataagctatagctttgattggttcctgccacatcctccaatgcaaaaccattcatcgtgcgcatcatagagaacatgtcctttgccaatgccgcaccgaaatctgcacgcaagcctacatttacactccagaatcctttacctctataccagccaaaagaaagaatgtctgtgttcaagtttacattcaaacggttatcagcctttaaacggtcaaacaacttgtcatttgaatataagtcacttccagaatccataaggtcaataatgtcacttgttcccaacacattagaagaagcagacatgttaaatgagccaataatcggcatattaaaatatcctttggtaggctgcaaacccggattcaattgtaaacgggcacttgttccctccataaaataagaagaacgtaaatactgagcttgtgccgctccccccaacatcatcatgccccccaaaagaagcaaacctttatatcccaattttcccataatgaattttatttagtaaattttaatgcaaaaataaaaatatctatatcaaagaagaaacaaggaaacaggacttgccgaccaaatatcacatcttccacactaaacaaacgttttttgctactaagtggtcaaaaaacattttattacaattggcaaaaacgctccatcatttccttacgatactttttggagacctgaagttcatccacattattaaacggaggatacatcacacactggcaaccctgcaccatcagtaaataattcatattgataatatacgactgatgaatttgcacaaaagcagtatcatacgcacacaaattctcagctctggtatttcgctttaaaggaataaaagtaccatttgccaaagctacctcccagattttacgttcggaaatataacggaaatatcctatatcagatacacgcaatacacgtaaatctccgaccggagtgactaccataaatgatttctcagctccatgacctgtatctgccagaaaagtggttgaatttttcatattgccttcaccacgtaaacgtcccaacacaacagaaagctcttctgaagcaacaggcttcaacaggaaatcaaaggcataactacgcaaggcatctatcagatacttgttgtatgcggtataaaaaacaatatgcatatcccaattttgctgttcatgcacttttatggccaaatccattcctaacatatccggaagttctacatccagaaataacaaatccggacgttctttttcaagcaaacggattccggcctttccattataggctattccctctacagagatccatggatatttcttcagctcaaagcaaagattatcaatggcagtttcctcgtcatctataatgacagctcttattttatcattcatgtttttctagtttttctttagttgatatgaataattcaaaggaatcacaaagcgtacctcacaccccatttctttttcttccccgactaatacattattaattttcatttgaatagggcgtgaattatatgtgtttagcaattgaatggtctgtgtaataactttcattccagtgccagttccatggtttacacttaccttacgataacctccaccattatcagacaccacaatttcaacctgattatcaagcagcagacgtatctgtatgcgcaacaatcgttttccttcttttaatctcagtccatgctttatagcattctctacaggaatctgcagcaacatggatggaactttcaccaccttcaaatctatcttgcagtccaaatccaactggtagtcaaaatcttttcccaaggattccttttccagtcccacatacgtatccacaaactccaattcatctgccaacgatacagccaggcaatcggtcagttccagattccggcgtatcagtttggtcaatccaatcagattttggctttcctcctctcctttatgaagattcatttcacgattcagcacattaaaaatgaaatggggagaaatccggtttcgtacattctccagtcgcaaggaagttatggcattttgcatacgccactgttccctgtcacgcaaccgcttcctatacaacacgatgacagaaacgacagctaccaacaggaaacctccgcccacaatcatatacagccattgatagagctgaagtacctgattctccttttcccgaatagaaatctccttcttcatcaaggtgctatcctgtgtatacttcaatttaagttctgctgcccgcatcttcactctttcattacgaatggagtcatctatatgatgattttcttccaaatagtgatatgcacgttcataatctcccaccttctcaaaataacgttgcaaataacgattacgcacgtgaatcatattaggttctacattatcatattttacagcatgtttcaatcgctctctggccaatgccacatttccctgcttcaatgccagctccataagctgcgtatctatgcaatacaaagctgtagcatgatgaatagaatcaaagaatccccgacattcctgcaaatagtaagaagcagaatccgtgcaatccagcatcaggaaaatttctcccagatttatcatggtcagatttctctcaaaagtcatatccggatactggtttaccacttcaagcgagcggcggaaataccctaacgctgtttcatagtcctgccggtaataataagaatttcccctgttgttcaaataaatatgtttctcaaaaggatgcattttatcataatagtgcgatgccaaatcataataataatcgcacagcgcaaaatctcttaattccatattcacttgagccaagccgtaataagcagggaatcgttgctcatcgggcatattcagagaatccgaaattgacaaggaacggttataccagaaagagcccaaatcataacgtccttgcttcacaaacacatctgccagattcagacaaatgtccggaagagattctctttttcctccccgactggcgtattcaaaagctctctgaaaacagaaactggcagaatctatctgcgaagtacggacaaacaaatttccccgggcattataaatcaatgcatacagctgataaacatctttatttttctctgttctgtcacaaaaagcagtaaccttgtcaagcaaataagatgcagaatcaagcttaaaagacaaaaagtaccctcttactttcaaaaaaagcaagcgataatacatcatactgtcttttaacgatggaagcgcactatctaccatctgggaaacttgttccggagattcaacggaagcttgttccatttgctgataaagcatttcaaaagagtctttcgagctctttttctcctcgcgcatacaacccatcataatgggtaacacaaagcaaaaactccatatacccactatatagtaatatctcatttttaaactcatacctccaacccttatttcataaaaacaaaaatacgtaaaacaatttatgagagcaaaaaactcattttttttcattgaagcctcaaaaagagttttacggatagacaaaatatcgacataaatatacgttttttattccaattaatctatgagaaatgtccgataaattacttaattcttacctgaattcccccacgtttgcagagaaatatgtacatttgcagtagaatcaagaactattatacgcaaatgaacggtaaatcctcttacgaattgccagacttatcctgctccatgggagcacatttaggcattcagttcctcgaaatggaagagggatatgtgaaagcacaaatgccggtagatgaaagaacttgccagccatttggcatacttaacggaggagcgtctctggctcttgcagaaatcgtagccggacatggctccattccattgtgcagtgcaaatgaaatgccttgcggcatccaggtaagtgccaaccacctccagatggttccgaaaggagaatttgtaattgccaccggacgcctcatccaccgcggacgcacatctcacctgtggaatgtagatatcaccaatcaggaaggaaagttaatttccaccgcacgcattgtcaatcaaatagtcaaaaaacggccatgaatacaccggaaaccatatatcatcagctccttgattcatttaccagcagccatgtctgctttgcattataccgtcttccctggacagacgaacccattctcgtcatgcaggaagaaggagagcctgaatatatccacagtctgaatgagctgaaccaaaaaaaaggatttcttctttctccgtttcagtttactccagcgcatccggccgtactcatccgcccggacatacaggcacacgactgggaagatattaaatctgccttgcaaagatggatgacacgccacccgcagcaagccgctccgtctcattctatagacgcatccacagattcgcatattagttccgaaaaagaagaaaaagacttgtacactgaaacattcagccgcttcatcctgccactcaaggagaagcagttccgtaaacttgtactgtcccgcagtacaactcacacgctgaatgatcagttttctccgctatcggctttcatacaggcctgcaacagctatcctcgcatgatgatttcgctatgtcacaccccttccaccggtacgtggataggcagtacacctgaaattatcctcagcggtcacgaaaaagactggcacacagtagcactggcaggaactatgcccatgcaaggagaagttatgcccaccgaatggagcaaaaagaacaaagaagaacaagcttttgtaggagactacatccgtaaagccatcaagaaattcggcagcaaaatcacggaaaagggaccatatacagcccgtgccggccagttggttcatctgaaaaccgatttccatttctgcctgaaagatacagctcatttaggcgatgtactgcaagaattacatcccaccccggcagtgtgcggcttacccaaagaggaagcctaccagttcatcctacagacggaacctcacaaccgccttttctattccggcgtcatcggatggatagttccggaaggagacactaccctctatgtcaacctgcggtgcatgcatattgaggggaaaaccgctacgttgtatgccggaggaggtatccttccagaatccacagctgatactgaatgggaagaaacgcagcaaaaaatgaataccatgcgaaatatcctgtaaatctaacatatttagaaatcatgtatactgacaaaaaaaatatacttcagcttgtagctttactaaaagcgcaccggatacaaaaaattgtgctctgccccggaagccgaaacattcctatcgtacaaacgctggtcaatattccggaatttacctgctatcccgtgacagacgaacgaagtgcaggattttttgccttgggactggcactgaacggaggtagcccggctgccatctgctgcacatcaggtacagccttgctcaatatccacccagccgtagccgaagcattctaccagcaggtgccgcttgtcgtcatttcggccgaccgccctgccgcatggatcggacagatggacgggcagacactccctcagcctggtgtattcggaagcctggtgaaaaaatctgtcaacctgccggaagtgcagagtgaagaagacgaatggtactgcaaccgcctcatcaatgaggcactcatggaacttgaccatcacgggaaaggacctgtacacatcaatgtacctatcagcgaaccgtttttcaagctaccggtcacggagcttcccgaagcacgcgtcattacccgctatcagggactgaacgtgtacaacaaggattaccagccactcatcgaccgcttgaaccgctaccagcgacggatggtcgtagtgggacaaatgaacctgatttatttgttcgacaagaaatacaccaagatgctctacaagcattttgcctggtttaccgaaaacatcagcaaccagacgattccgggcatgcctatccgcaacatcgagccactgctctgctccatggacttcgaagcccagcagaagatgcgtccggagttactgattacttacggaggtcatatcatctccaaacgattgaagaaattccttcgccgtcatccgccggtagaacactggcacgtggctagtgacggacaggtggccgaccttttcggctcactgaccaccgtgattgagatggacccgtttgagttcttagaaaagattgccccgatgatggacagccgcacaccggaatacccccgcacatgggaagctctgtcgaagaatattccgcaagccgtattcccctactccgaaatgagcgccatcgggaaagtcatcaatcacctgccgacttcttgttcccttcacctggccaacagctccactgtgcgctacgcccaacttttccctctcccgaacgacgtggaggttttatccaaccgaggaactaacggtatagaaggttctttgtctactgccatcggctacgctacggcgtccgacaaactcaatttcatcttcatcggcgacctgagtttcttctacgacatgaacgccctctggaatgccaactacggaagcaatgtacgcatcctgctcctcaataacgaagggggagaaatattccatgcgcttccgggactggaaatggcagacagcagccgacgcttcattacggccactcaccgcacttccgccaaagcatgggccgaagaccggggattccagtatctttctgcccacaatgaagaagaacttgaccaggcggtagaggtattcacccagccatccattacctcacagcccatgctgatggaggtctttacagaaaaggacaaggacatcgaacacctaaaaacgtattatcacaacctaaaaaaatagcaatatgtcacaacccagagaatggaaaaccatcaaggaataccaggatattctttttgagttttataatggaatcgccaagattaccatcaaccgcccgagataccgcaatgcgttcactccaaccaccactactgaaatcagtgacgcattgtattactgccgtgagtgtcaggacatcaatgtcatcgtactgacaggagctggcgacaaggctttctgctccggaggcgacatgcacgtgaaaggccacggcggatacgtaggtactgacggcgttccccgtctgaatgtgctcgacgtacagaaacagattcgttccatcccgaaaccggtgattgccatggtcaacggatatgccatcggtggcggacatgtgcttcacgtagtctgcgacctgaccattgcgtctgaaaacgccatcttcggtcagacagggcctcgcgtgggcagcttcgatgccggatttggttcttcttatctggctcgtatcgtaggccagaagaaagcccgtgaactctggttcctctgccgccagtattctgcccaggaagcactggatatgggactggtcaacaaagtcgtaccgttcgaccagctggaagatgaagtggtagaatgggctgaaaccatgatgcagcacagtccgctcgctctgcgaatgattaaagccggacttaatgcagaacttgacggacaggctggtattcaggaactcgccggtgacgcaaccatgctttactacatgacggaagaagcacaggaaggtgggaaagctttcctcgaaaagcggaaacccgactggagcaaataccctaaattcccctgattattctctcatctcattttttatcggacagaaagcagaaaccatttccgctttctgtccgcttttattcccttcacaacagaccaatatgtacacactgaaaatcattccgcgcacacttcatttcaaacaaccggccggtacttcacgcggagtatatcacacccggcaggtatggtatctgctacttactgacaccgaaaccggacaatatggcgtaggtgaatgtgctccgctgcccgcgttaagctgcgacgacctgcccgattatcctcgcctgctagctgaaatctgtgagaaaacagccgccaatggctacattgattatgaaggacttcgcccttacccctctatactattcggactggaaaccgcatttgcccatctgcaggccaacagtctgcagttttgggatacccctttcagtcgcggtgaacaaggtattcctatcaacggactcatctggatgggtaatttcgatgaaatgtaccgccgcatagaagaaaagatgaaagccggattccggtgcatcaaggtaaaaatcggagcgattgaatttgaacgtgaactggaactgttagctcacatccgtcgccatttctcagctgccgacatcgaactccgggtagatgccaacggagccttcagtcctgaagatgccttacggaaactgacacagctgaacgaatttcagctccactccatcgaacagcccgtacgcgccggacaatgggaggtcatgaaagaactgtgtgccacttcgcccttccccatcgcactggatgaagaactgattggagtaaatgaaacggaacggaaaatccagctgctggataccatccgcccacaatacatcatcttaaagccgtccttgcacggaggtatccagggaagcaaggaatggattacattggctcaggaaagaggcataggctattgggtaacctccgccttagaatccaatatcggactcaatgctatcgcacagtggtgtgccactctccaacctaaaatgcctcaggggctgggcaccggtatgcttttcaccgacaacattgactacccgctgcacattgaaggcgattgtctgtggttccatcctgaagaaaagatacccgatttcccgacttatctgcaaaccatctgacatgaacgccactccatttattacagaaatagcccgtcagtccattttgattgacgggaaatgctacaccgctcaggaaacccaaatacctgaaggcgaatcacaaagcctgctgcaaaaacgattccatgcggaatatggagcagacagctttcaggcctcacttgccgatttcttagcagaatggtttgacgacaacaccaccgtactggtgcatacctccggctctaccggaacgcccaaaccgctccgggtagagaaacagcgcatgatgcaaagtgccatgctgactgtcagtttcttaggtctgaaacaaggagacaccgccttgctttgcatgcccctgaaatacattgccggaaaaatggtggtcgtccgtgcgttggtagccggcctgaacctgttacctgttactccttgcggacatccgttggcagagataaatactgctcctgagtttgccgccatgatacccatgcaggtgtacaactcactacaagtaccagccgaaaaggaatgcctgaaacaagtacgtcatctcattatcggcggcggagcaattgacagcacattagccacagaattagcgtcattccctcatgccgtatggagcacctacggaatgaccgaaaccctttctcacatcgccctgcgacgactgaacggcccggatgcctccaactggtacacccccttccagggagtcaaggtttcactctctccggaaaacaccctgaccattgaagcaccagccgtttgtgcagaggaactgaccacaaacgacatctgtgagttcaatgcccaggggcagttccatatcttaggacgaaaagacaataccgtcaacaccggaggggtaaaggtacagattgagcaggtggaaaatgcactgaaaactgcgctgccagttcctttcatggtgactgccgtgcccgacccaaaatttggagaatgcatcgttctgctgctggaaagcgaagaaaataccgatgtatcccctctgttagcacaggcttacgaccagcttccgacttactggcggccgaaacagaccttcttcgtccggcatcttccacaaaccgaaaccgggaaacccgaccgcgccaccgcacggaaagtggcccaagaaatcgcaagcgcgaaaaagaaataagtaaaaatccccttgtatatgagcatttgattctttaactttgtttaaaattcaaatgctcatttttttaactgacatcaaaactatggaagaatacactttcctcgcccccttgctgctcactatcgggggactcattatcggagcaatactgaaatccttgctcaaacacagccgcctgccctacacggtggggctatttgccattggaatcattttaggagtcatgaaccgtaccggcgtttttcaatcgctgccggaactgcatgatgcggtcagttccgtcgccaacatcaatcccgacttgattctttatcttttcctgcccatcctgatattcgatgcagcctacgaactcaacctgcacattttcaagaagacattggccaacgccaccctgttggcggcaccgggactcatcatctgtatgttactcacgggcgccctcatgatgggagtagcaaccttcatccccggttttgaatcgtggacatgggcatttgcactgatgttcggagccttaatcagtgccaccgacccggtagccgtagtagccctgctgcacgagttgaaaaccagcaaacgcttctccacccttgtcgatgcggaatccctgctgaacgatggtacgggcatcgtctgcttcatgcttttcttcggagcatacgccgccggagaagctactcatgcctctcctgtcattacgtttatccgtgaagtgggcctcagtacccttttaggatttctgttggcacggattgtcatctggttcatcacgcgcatcaactcggaagagatggtacagaacagtgtcatcatcttagcggcctaccttaccttcattctctcccaatattatctcggcgtatcgggagtgattgccctcgtagctttcggactgaccgtcacttacgtaggaaaaccccggttgaaaccgcaggtgaatacgttcatggagcatttctgggaattgctgacctacatagccaataccctgatttttatcctggtgggagtagtcattgccgaaaaagtggatttctcctggggagcattaggcgtgcttatacttatctacatcgcccttaaccttatccgctttgccatgattatgctgctctaccctgtgatgaaacgcttgggatacggactgaccaaacgcgaatcagccatccttacctggggagggttgcgcggtgcattggccatgaccttggccctgatggtatcttataccccggctattccggaggacatccgcagccaggtattgttcttcactgccggcatcgttaccctgacactctgcatcaatgccactaccatgcgcgcactgctgaaccgcttgggactgactcacgtaccttctgcacgcaccatgttggcctatcgtatagagaaatcaatacgcgacaattccgaaaaatacctggaaggattgaaaaaaagagacgccttagaaggagccaactggcacaaagtggaaagttacatgaccgcacaaccgcaagagccggccaagaatccacaaaacaaagccatgctgccggaaatccgtctgcgtgtattggataaggaaaaagccatctgccgggaaatctatgaagaaggagtcatctccaagcccgtattcctccggctcatgaactcgctggatgaattgtatgaccacgacgggaactacccgctgaacgtccgcacctccattttcaagttctgccagcgtacagacctgctgaacacactgcggaacattccttacctgcagaattggatgaccttctatttccgcgaacgcatcacggtagtgtacgacttaggccgtggcttcattattcttcagaaaggaagcctgaaactgctggacgacctgcgtgcctcagaatgggtgaccggcgaacaggactccgtgttagacacattacgggaagagataaatgataacatcaatcgcatgagtgcctttatcaataatctggctgacaatttccccaaagcatacggtcatgcactgaccatcaagtccatccgcatgctgctgagcaatgaacgccgcaccgtgaaacagctaatcaacaacggtatgctttccgagaaagatgcagaaaggctgctggacgacattgacgaacgtaccgacgaaatcaattccttcagccacaccttcaccgcttctttcctgcgctggctgttcttcatcaagaaaaagaaagtctatcgcaactaaataagaaaaaaggaagttgcgccctcacagggcacagcttccttttcctatataatcactgcttacttctccctggtattcaggatgccgctgcagccagaccacggcataagagcaggtagctatcgccttcagtcctttgcagcgcccgtaatcgtaggctgccttcaccaaagcagaagcaataccttttcctccgatggcttccggtacaatcgtatgccgaatatccaacccttcgtcatgaatctgataagccacgtgggctctatgtccctccagttccacatagaactcctgtcgggatacatcatgttttacttccataatccttttcatttaactgattctgtcacaagataggcattttatcttccatgaccaaacgatgagactaaaattcagaaaagcatcgcaacaaatacttcacaagtaaaacgataggagctcaatataaagcccgttttttcaaaacgtttttttacacttctctaaaatcatagttaaatttacctcgacacgtacgtgacgaggtcttgacacgttcgtgctgatatctcgtcacgttcgtgtcgagaccttgacagctacgtgtcgaggtatttttgtataagcgtttttatttcatctcacacgcattacaaagaaataaacctgccactaaaaagaatcacatttttatttctatctttgcacaattctaattgaaacgccatgcaaacaagtgacagtatcgtgattattcctacttacaatgagaaggaaaacatcgagaatataatccgggcggtattcggactggaaaagacattccatattctggttatcgaagacaactctcccgacggaacggccgacatcgtacgccgtctgcaaaaggaattccccgaacgtttgttcatgattgaacgaaaaggcaaactcggactgggaacggcttacatcaccggcttcaaatggtctatcgaaaagggatacgactacatctttgaaatggatgccgacttcagccacaatcccaatgacctgccaagactttacaaggcttgccatgacgaaggggccgatgtatccatcggttcacgctatgtaagcggagtcaatgtggtgaactggcctatgggaagagtactgatgtcctactttgcctccaaatatgtgcggttcattaccggactacccattcatgatactaccgccggctttgtatgttaccgccggaaagtgcttgaaaccatccatctggaccacatccgtttcaaaggatatgctttccagattgaaatgaaattcaccgcctttaaatgcggattccatatcacagaagtaccggtcatctttatcaaccgcgaattaggtacttccaagatgaacagcagcatctttggagaagccgtattcggcgtcatccaactgaaatgggacagctggttcaaaaaatatcctaaacacactaattgaaaagggttatgaaacgtacatggatacatcatgcaatcatcgtgaatgaaggacgccgttttgtcggctccgtagtgattgaaggagaaaaaatacaggaagtcattgaaggcgacggtgctcccgctgccgtatgtgacgaacagattgatgcgcaaggatgcttcctgctgccgggagtgatagacgaccatgtgcatttccgcgatccgggccttacacataaggcagacatggctaccgaaacggctgcagctgcagcaggaggagtgacctcgttcatggacatgcccaactgtaccccgcagaccacaaccttagaggcactggaaaacaagtttaaggatgcggctaccaaatgtattgtcaattattctttctatttcggagccacaaacaataatgccgaccagctgaaggcactggacaagacacacgtatgcggcgtgaaactgttcatgggggccagcaccggaaacatgctggtagaccgcatggaagccttgaaaaaaatattctccgaagcgggcatgctgattgccacccattgtgaagaccagcagattatccgcgaaaataccgaacgcttcaagcagcaatatggcgaagacctggacatttctttccatccgctgatacgtagtgaagaagcttgttaccattcttcggcactggccgtacaattggcgaaggaaacgggtgcccgtctgcacatcctgcatatcagtacggcacgcgagttaggtctgttagaagaccgcccgctccacgaaaagaaaattacggcagaagcctgcgtatcgcacctcatgttctgtgatgaagactatgcgcaattcggggcacgcatcaagtgtaaccccagcatcaagacaaagaccgaccgtgatgcgctgagaaaggctctgactaccaacctgattgacgtcattgctaccgaccatgccccccacctgctgagtgaaaaagaaggaggagcactgaaagccgtatcgggcatgccgaccctgcagttctcactggtcagcatctacgaactggtacacgaaggcatcctgtctatcgagcagctggtacagaaaatgtgtcatgcaccggcccagctttaccagattagccaaagaggatttatccgaccgggctatcaggccgacctggttctgctgaatccgcataaggaatggaccgtaaccaccgactgcattgaaagcaagtgcggatggagtccgatggaaggccgtaccttccatgcacaggtagaaaagacatttgtcaacggtacggcagtttacgagaatggaaaagtaaacaaagcacaccgtggacaagcccttcggtttgaacgctaaaagaaatcaaatgaaaacagacatcacgaccgtccgttacgacatacacgacctggctgaatacatcaactggatttattttttccacgcatgggggtttcagcctcgttacgcagccattgccgacattcatgggtgtgatgcctgccgcgccgggtggctggcctcatttcctgaagctgaacgtgccaaggctgccgaagccatgcaactgcacaaagaagcggtacgcatgctgaacaagattgacgggaaatacaaggtctatgccatttatcgcctgatggaagccaatgcagagggcgacaacctgtggttagagggcactttatttcctctgctccgtcagcagacccgcgtccgccccgacgacccgtttctctgcctgagtgactttgtgcgtcccctttcttccggcatcaaggatacggtaggaggattcgccactaccatcgatccggccatggaagaagaattcagccatgacgactaccagtccttgctcatcaagacattgggtgaacgtctggcagaagccgcagctgaaaaaatacacgaaaccctgcgcaaagaggtatggggatacgccaaggacgaaaagctgaccatgaaacagttgctcaacgaagactatcagggcatacgtcctgccgtggggtatccttctctgcccgacatatcggtcagctttctgctcgacaagcttattgacatgaaacgcatcgggatacatctgacagagaacggaatgatgcagcctcatgcctcggtatgcggactgatgtttgctcatccggcttcacgctacttctcggtaggaaaaatcgatgaggagcaactcatggattatgcttcccgccgaaagatagatgccgacgtactgcgaaaatacctcgcagccaatctgcaaccctaaaataagtacacaaatatgattctactacgcgtgtcactgatattcctagtcttgtttctgctacccgactggtacatatacaagacgtatctgaccagcctgcaccacaggagatggaaacgggcttactggctgcctactgttttgctgttgcttattctggtcatcttcctgattggtcacgacaccttacatgaatatttcggtacttacctgattgtagccctgtgcgtaaccatacctaaaacggtattcatgctgaccagtatcttgctgaaactcttcagaagactggtgaaacgtcctgttcctcacggatggatagccttagcacctgcactgctcacctttgggtatgtattgttcggagcaatcaagggaaaggaaaactttcaggtgaaagaagtcaccttctattcgcctgaccttccggacgcattcgacggataccgcatcctgcaattgtcggacattcattccggaagctggaaagggaacggaaaggcacttcaggaagccatcgacctctgtaaccggcaaaatgccgatttggctgtattcaccggcgacctcgtgaacagccgcgctgacgaactgctggaatttatgcccgtgttcgcacaactgaaagcccgcgacggggtgtattccgtcttggggaatcacgactatggctcctacgtaaaatgggaaaatgagcaggcccgtctggctaacgtagacagcctgattgcacgcgaaaaccgtatgggatggtgcatgctgcaaaatgaccatcgtattatatataaaggtacggattccattgccgtagttggcgtggaaaacagcgggaaaccgcctttccccgatagaggcgacttgcccaaggctttgcaaggcacagacggcatgttcaaggtcctgctaagtcacgaccctacacactggcgccggaaagtgcttccagacacctcggtacagcttaccttgtcaggtcatacccacgacatgcaaatcagtctgttcggcttctcagtgtccaagtttatctatccggaacacagaggactgtatctggagggcaaccggggactgtatgtcaacatcgggttaggctatgtgctcttccccatgcgcttaggtgcctggccggaaattaccgttctcacattaaaaaaaggaaataacaaatcaatccaataaaatctatcacacttatgagattcttatacatcatttaccaaatctgtatcgggcttcccatttttcttgtgttgaccatcctgactgccctgaccaccatgttgggatgctggctgggtaatggacacttctgggggtattacccgggaaaaatctggtcacagctcacttgtttcctgtttctgcttccggtgaaagtggaaggacacaaaaacattgaccacaaaacatcgtatgtattcgtagccaaccatcagggagctttcgatatattccttatctacggattcttgggaagaaacttcaaatggatgatgaagaaaagcctgcgtagcattcctttcgttggaaaagcctgcgaatcggccggtttcatttttgtagacaaatccagtccgcgcaaagtgtatgaaactatcaaacgggcagaaaaaatcttgcagggaggtacttcactcgtagtattcccggaaggcagaagaacctttaccggtcgcatgaacgagttcaagaaaggagctttcctgttggctgaccagttgcaacttccggtcgtaccgatgagcatcagcggctctttcgatattctgccgcgcacgggcaaactgctatcctggcatccgttgaagctgaccatccatcagcccatctatccacaaggaaaaggacaagacaaccagaccatgctgatggaagaatcctatcaggccattgaaaaaggattgccggaaaaatacaaaggagaaaagaaaagtggagaataaaaaaataaatatcgggtaggaagaatttcttacccgattttctttttaatgaaggggagcatgcgacatattttcacgtgccacagacacatattccttcaccatgtaattgttcttgaacgcttcaggagccgcgtcaatgatttcctgcatcagcggagtcaggaagggataaggcatgctgttacccaacataatgaacaaccccggtcccaatacgttctcgtaattgtcctgaataaaagtcttcgccagctggttcatctccgtagctatctcgtcacgttttttctggatttcctgatgcaccgtctgcaaatcctttccatccataatcatgcgactttcctcgcgctctacctcgtaagcacggtcgtcgagcgagtttttctgtaccacaaaatcattgaaacaatcgttcaatggagtccccttgatggtaattcccgcattgtctatctgaatatcaatgtgacccggttctatcactaaaggcatgatgcactcatcatccatatacaatgaagctaaaaccgtggaatcaacctttccctgcatttcgaataagccatgaattacttctgccgaatcaatgttgaccaatttatcacccaccgggatttttataaaaagcattttaccgtccaacatagaaacagacgaagtaccttctatcttatatttcttactgcaagaggtgcaaagcatggcacacaacaggaaaaaataaagtttatacatgctgaaaccttttaaatttgtgggcaaaggtataatctttcaaggaagcgccgaaatatattatcaaaatttatactaagatagtggtttattaccttttaagtgagccgtgtgagaatggtgtgcgtttttttactatttttgtgcaatctatattttaacactatacataacaatgaaaaaactgaaagtactcgcactcgcacttgtttgtgctgtattctctccggccaaggccgatgaaggaatgtggttgctccagctcatgcaggagcagaaccttgcggaccgaatgaaagcgcaaggactgaaaatggatatcatggatatctacaaccctgaccaaattacattaaaggatgctgtcggaattttcggacgcggatgtacaggtgaaattatctcacccaacggattgattctgaccaatcaccactgtggatacgatgccatccaacaacatagctcggtagaacatgactacctgaccgacggattctgggcaaaaagttaccaggaagaacttcctacaccgggattgaccttcaaattcgtagaccgtattgtagatgtaacggaaaaagtaaacgaagacatccgtaaaggaaaagtgaccgaagcagaatcattcggaagcaaatacctgaagaaactggctgccgacgaactgaagaaaagtgacctgaaaggcaaaccgggcatctctacacaggctcttccgttctatgaaggtaacaaattctacttgttctttatcaagacttacagcgacgtgcgtatggtagccgctcctccttcatcaatcggtaagtttggaggtgaaaccgacaactggatgtggccgcgtcacacaggcgacttctctatgttccgtatctatgccgacaaggatggtaatccggcagaatacagcgcagagaatgtacctttgaaagtaaagaaacacctgactatttcactgaagggattgcaggaaggcgactatgccatgattatgggattccccggaagtaccagccgctacctgacagaaagtgaagtacgcctgcgcatggaaggtatcaacgtgccgcgtatcaccgtacgcgaagaacgccagaatattctccgtaaggaaatggctgccagcgacaaggtacgtatccagtatgccagcaagtttgccggttcaagcaactactggaaaaactccatcggtatgaacaaggccattgtagacaacaaggttctggaaacaaaggcagaacaggaagctaaatttgctgcttttgccaaagaaaaacagaatgctgactatgcagccgtagtaggaaagattgacgaatacgtgaagcgtgtcactccgctgcgcacacagctgacttatttcacagaaactttcagaagcggtatcgaattcactctgacttcgaagatggaagcacttcaggacttggctactgccctgcagaagaacaagaaaaaagatgtagaaaaagccatcgctaccctgaaagaagcctacgctgacatccacaacaaggactatgaccacgaagtagaccgcaaagtggctaaagtactgctgccgctttatgcagaaaaagtaccggctgaagcattgcctgatttctatcagaccgtcaagaatacattcaagggcgattacaatgcttacgtagatgccctctacaacaacagtatcttcgccaatgaaaagaacttcaacgctttcatcgagaatccgactgtagaagcaatcaacaaggacttgtcggctgaatatgctgctgcagtgagcaagaaatacaaggaactggcagacaagctggatcaagccaacggtgacattaacctgctgcacaagacttacgtacgcggtctttgcgaaatgtatgcaccgactccgaaagctccggatgccaactttacgattcgtctgacttacggtaacgtaaaggcttacgatccgaaagacggtgtacactacaaatattacactacactgaaaggggtaatggaaaaagaagacccgaacaatccggaattcgtggtaccagccaaacttaaagagttgtatgctacaaagaactacggacgctacgccctgcctaacggagaaatgccgacttgcttcctgactaccaacgacattaccggcggtaactcaggttctccggtcatgaacggaaacggtgaactgattggagctgcattcgacggtaactgggaatctctgtccggtgacatcaacttcgacaacaacctccagcgttgtattgccgtagatattcgctacgtgctgttcatcgtagaaaaattgggaggctgcaagaacctgattgacgaaatgacaattgtagaataatgaagcataagttattattatccttatttgctaccctttccctcaccgctcatgcggatgaggggatgtggatgctgactgacctgaaacagcagaatgctgccgtgatgcaggatttgggattggacatcagcattgaccaggtgtactgtccggacaacatcagcctgaaagatgccgtggtgcatttcggaggcggatgtacgggggaagtcatctcctcggaaggactggtgctgaccaaccatcactgcggatacggctacatccagcagcatagttcagtggaacatgattacctgaccgacggcttctgggcgatgacgcgtgaacaggaacttccgtgtgaaggactaaacgtgacctttatcgaccggatacttgacgtaacggaatacgtgcaaaagcagttgaagaagtccaaagacccggacggaactaactacctctctccttctttcttggccaaagtagctgaaaagtttgccaaaaaggaacgtatccgcaccaacgaatttacaactttggaactgaaaccgttctatggagccaacaaatactacctgtttgtcaagacatcttacaaggatgtgcgtatggtaggtgctcctccctcttccatcggtaagttcggagcagataccgacaactggatgtggccccgccactgcggtgacttctctatcttccgtatctacgctactaaggacggaaagccggccaattacagtgccgaaaacgtacctttgaaagtaaagaaacacattgccatcaacctgaaaggggtgaaggaaggtgactttaccttcgtgatgggattccccggacgcaactggcgttacatgatcagtgatgaggtggaagaacgcatgcagactaccaacttcatgcgcgacaccattcgcggtgtacgcctgcgggtgctgggagaagaaatggctaaggatgcacgtacccgtatccagtatgcagccaagtatgcttcatcggccaactactggaaaaatgccatcggtatgaacgaaggactggtacgcctgaaagtactcgaccgcaaaaaacgggagcaggaacaattgttagctttcggagattccatcggaaatgacaattaccggaaagcctacgaaagcatcaagcagattgtagcacagcgtcacgatgcagtgtaccaccagcaggcgatttacgaagccttaatgctgggaaccgaattctataaggtacccgatacggatgcgttgagagtggcactggaaagccagaagcaaaaagacattgacgaagctgttgctgccctgaaggaagccggacagaagttcttcaacaaggactacaatccggaagtcgaccgcaaggtatccaaacagctgattgccttgtacgcccgactgattccggccgaccagcgaattgacatcttccagaccatcgaaaaggatttccagggaaataccgatgcgtttgtggatgcctgcttcaaccagtccatcttcagaagtccggaagcactggatgagttcctgaagcagcccgatgcacagcaactggaaaacgacctgatggtgagatatgccgcttccgtacgcaacggataccaggctaccagcgatgccatgcaggaggaaaccaatgcatacaacgcagctcacaagacttgggtagaaggtgtattgcaaatgaagaaaaccaacggacagccaatctatccggatgccaactctactctccgactgacttatggaaagattggctcttacgaaccggctgacggaaaggaatacctttactataccaccttgaaaggggtaatggaaaaggaggacccgaacaatccggaatttgtggtaccagccaaactgaaagagttgtatgaaaagaaggatttcggcccctacgccatgcccgacggacgaatgccggtctgcttcgccactgcgacagacaacacaggaggtaactccggttctccggtattcaatgcgaaaggagagctaatcggtaccggattcgaccgcaactatgagggactgaccggtgacattgcctacaacccgcaactgcaacgtgcggcttgtgtagacatccgctataccttgttcatcattgacaagtttgccggtgcttctcatttgctcaaagaaatgaccatcatccgataaacagaaaaagccagactttccggtctggcttttttatttcaggcttgtgcctcattatcttcttccaagattttctttatctccgcatcggccttatacagcttgttcttacagaactttatcagcttctgggcttcctgcaagtattcgcccaactggtcaatatccagttcattgctttcaatgcgagacactatttcctccaggcgtttcatcgcttctgaataggtttccttctttgctgccatatcacttatttattactttactcctaaatttaccttttgccagacgggtttccacttcatctcctggtttcaacaaggaagcatctgtcaccacctttccatccagcagagtaaggctgtatccttttttcaataacttctccggagaagccgaatctacccgctgtgccagcagttccagccgatgtgtttcacgctgtacacggttctgcaaagcggaaagtaatcggggcatcaactgcaagcggtagttttcctgcaacaagcgcgactgccaggccgttttcatccggttctgaaatttctcctggcggaaattctcccgctgcaaccgcatctgcacctgtcccggaatccgggttacaaatgaatccaaccgctgtttttcctgttgcagcaaacgaggtacttcctgatagataacctcctcgtatgcctccagctcctgtgccgtctgtcttacatgattaatcagaaactcagccgcagctgtcggagtcttgacacgggtatgtgaaatcatatccagcaccgtatcgtctcgttcatgaccgattccggtaataataggaagcgggaactgtgcacagtttgccgccaaatcgtaggtatcaaaacccgaaaggtcggaagtggcccctcctccccggataatcaccaccacatcccagttatcgcgcgtcgcattaatacggtcgagtgcctgaatgatggactgttctacctgttctccctgcataatggcctgaaaaagccggggataaaatacaaagccgaaagaattatgcagcaactgattgcagaaatcgccatacccggcagccgtagccgatgaaatgaccgcaatacgctgcgtcagtacgggaagttccagttccttattcagtgtcaggattccctcctcatccaactgccggagaatttccttacgacggcgtatcatatcgcccaaggtataggtggggtcaatattgactaccgtcagcgagtagccatacagctcgtggaaatcgaccgtgacttttaccagtaccttcaagcctgaaacgaaagcctgccccgtttcccgctcaaaataactccgcaagcgggtaaagacatttgcccatataattcctcgtgccttggccagaagcgcattgccggtagcatctttctgcacaaactccagatagcaatgtccggaataatttacgcgtacatcgcttaattcagcctgcacccaatattcatccggcagacaggaggtgatgctccgtctgaccaatgaattcagttcgagtaaggaaagaggtttattttccatcagtatccgctttcagtttcatggccagttggtaggctttccacatatccgtcactccatatccgtaaatattatcgggataagcattacggtcgctggcttcatgcactacctgaatgagctgccgtaccgtaagccaaggacacgcctgccacaaacaagccaccagtccgcagaaaataggcgacgcaaaagaagtaccattggcaaaagcggtacctccgtctactcctaccactgccgaatgtacgcccatcgccatgacatcgggtttgatacgcccgtctgccgtattaccgatggaagaaaaagcggcattcactcccatattatcgatggcacctatggtcaatatatcttccgcatcggccggaggagtgatttttttccattcatccataccggaatttccggcactgcataccaccaaaagccctttctttgctgcatacgaagcagaagcggccatcaaagaagtatgcccatccaactgacgatatgtataattatcaatcggatcgtcaaatgaataatatcctaaggaggtattgacaatatccactcctacactgtcggcaaattccactgccgcagcccagttatcctcttccaccggctgttccgtatcattgtcttcacttcttaacagccagtagcttgcttcgggagctgttcccaccatgacatgaggcgtattcacagccatgcacgacaagactttcatgccgtgattatgttcgccataaatatctgaagaaggattgacaaaatcatgtgtgcctaaaatcgtcgtattcttgaagattttcatggcatccacattataaaagccagcatcgatgaccgcaatctgtatccctttgcctttaaagccggccagatgcagactgtctccatggtgaatcttgatttgttcggctcccattccataataatcatcctgctttttccactgattcttcacctgctcctttctgtctttgttacggggcataatggaatctggagatacccatacttttttgatggagcggacaaatgaattatccaggaagcgcaaggcaatagcctcatcgggaacctgcatcagcacggtattgttccatttgctggatgagatgtattttcctccctgcgactccaggcgctcaatataggcacgacaaacaggcaggtcggtagaatcaacggctaccccctgactggcacgacgggcaagtgcccgttcggacaaaaaagtttcaggatgttccaaagaatgtacagactttgacttgtcagtcaactgcactctgtatttatataaactctctgccgagacactacttccgcagagcaaaaagagaagagctaatcctattctgttcactttcatccacatagcttttattttggagcgcaaagatacacaaagttttccctgaatgcggaaaaaagtttacctttgcacgatttttttagaaaatctaaagatttctggataacaattaataaggtaaataattatgtcgcaaaaaggaacagccacagaacttggcactgaacgaattggaaaactattgatgcaatatgccattccggccattattgccatgactgcttcttcgctttacaacatggtagacagtatttttatcggacacggagtaggtcctctagccatatcgggactggccatcacctttccgctgatgaacctggctgctgccttcggttcactggtgggagtcggtgcctctaccctcatctccgttaaattaggtcagaaggattatactaccgcacagcagattttaggaaacgtcgtatcattaaacctgattatcggggtgctgtttaccattgtctgcctcttgtttttggaccccatcctgtatttctttggcgccagtgaggctacactgccctacgccaaggattacatggtgaccatcttattaggaaatgtaatcacccacatgtatttaggactcaactcggtgttgcgctcagccggacatcctcaaaaggccatggccgccaccatactgactgttattatcaacactttgctggatcccttgttcatctacaccttccacatgggaataaagggagccgccgtggcaactgtcctggctcaggtgatttcactctgctggcttatctggattttctgcaacaaaaatgaattgcttcacttccggagaggcatttatcgcctaaaaagaatactagtagaaaatatcatcggtatcggactggctccgtttttcatgaacctggcctcctgttttatcgtcattctgataaacaaagggttaaaactatacgatggagatttggccatcggtgcatttggaatcgtcaaccgcattgtattcttattcgtcatgattgtgatggggctcaaccaaggaatgcagcccattgccggctacaactttggtgcacagaattatcaccgtgtgaatcaggtaatgaaatataccgtcatcgctgccaccatcgttaccaccagtggcttcttagtgggcgaactgatgccggaactggccgtagccgccttcaccaccgattcacagctcatccagctaagtgccaaaggcctaagggtagtggtcatgttcttccctatcatcggctttcagatggttacttccaacttcttccaaagtatcggaatggccaagaaagccatcatactttctttaagccgtcaggtactgattctgattccctgtctgcttatccttccacttttctggggagtagacggagtgtggtacagtatgccgatttctgacataaccgccagcatcattgccggaagcatgctctacagtcagttccagaaattcaaacgacacgctgccgaaaccggaatcgaaataaaataaaagacaaaaaagtgacatttttccgcagaaagaattatatttgttgtgtatcaactaaagagttacactatggacggacactatgttatcaatctcggacgccagctgggcagcggcggaaaagaaataggtgaaaaattagcgaatgacttaggcattgccttttacgataaagagcttatcaacttagcttctgaagagagcggactttgcaaggaatttttcgaaaaagctgatgagaaagcttctcaaaccattttaggaggattattcggaacccgtttcccgtttattacagaaggagcctatccgtacaactcctatctcagcaacgattctctgttcaaaattcagagtgatgtcatccgtcatctggcagaaaagcaatcgtgccttttcgtgggaagatgtgctgactacattttgcgcgaccatcccagatgtgccaacgtctttgtgtcagcctcaccggaagcccgtattgagcgactgatgaaactgcaccacatcagcgcggaagatgcagaagacttgatggaaaaagcggacaagaaacgttcttcctattacaactactacagctacaagacatggggagcagctgctacctatcatctatgtatcgattcttctgtattaggtattgatggtaccgtggaattcatcaagaattttgtcaagctgaaacttcatctgtaagaaaagataaagacataaaaaatagagaggctgttcaactgagattgagcagcctctctatttttatacgaaacaagccattcggaatctgacttttataaaaatccagtacttcttaggcagtactggagtactcccctgaaagtactgcagtactttctaagaagtattatagtactgcctaagaagtactgagaactttgacttttcctgatacaactagacgttttttctttttataaactggaacagtagacactttgtactcgtgtatctgagaaggactattgtttcatcaagtaagctttaaatgccgcaaagtctttcgacatcggtacactctgtttggtacctttcatgaatgcctgaagcttttccggtatttttacttccactccaatgatgctttccactgtttgaaggaattttgccggatgagctgtttccaggaacaaaccgacttccccttctttcagttcttctgccaacgcacggtatccgcatgcaccgtgaggatcgagcagataacctgtttcttcataaaccttctgcaccgtttcacgtatctgctcatcggtataggtttcgccgctgatttcagaagcaatggcatcgtgactaccttcgtacaaatccagtacccgggcaaaattactggggtcgcctacatccatagcattggcaatagtagccaccgacggacgcggacaatactctcctgtctttaggtattgatagaatatatcgttacgattattagcggcaataaagcgtttcaccggaagtcccatacgcttgccaaacaatccggctgtaatatttccgaagttaccgctcggcacacaaaccaccaggttatcggccttaccgatttttttcatctgcgcataggcatagaaataataaaaggcctgcggcaggaaacgggccacattgatagagttggcagatgtcaactgcatgtgctcgttcaattctttatccatgaacgcatttttcaccaacgcctggcagtcatcgaacgtaccgtccacttcgaccgctgtgatattacgtcctaaggtcgtgaattgtttttcctgaatttcactgacctttcctttcggataaagcacatacacatgaatgccttccactccaaggaaaccatttgccaccgcacttcccgtatccccggatgtagctaccagcacattgacctgcttctttccttccttacggataaagtatcccaacaggcgggccataaaacgaccacctacatctttaaaagccaatgtaggtccgtggaacagctccaaagaataaatattgtcttttacttttactgccggtacatcaaagttcaatgtgtcatacacaatctgtttcaatgtttctgccggtacatcttctccaaaaaaagcatctgctactttataagctatttctggaaaagaaaatgtctcaatctcgtcatagaacgattgtggcaagggtttaatctgacggggcatatataaacccttatctgaagccagtcctcttaccacagcttcttccaatgtcgcgtctaatgcttttccgtttgtactgtaatacttcatattgctatctgttactgaatattcataaataggttcataaactcatctttctccatcaggccatatcctccttccttgcaactgatttcatcataagtctgcacggcatccggctcaatacccggataatatatcaggaagggaatcggttcattggtatgcgttctcaactcacaaggagtaggatggtcgggcaataccgcaatggccaccggctcgtcccattgttttactgcttcatagaccggaccgacaatacggctatccaagtcctcaatggttttcagtttcaacggaacatctccttcatgacccgcctcatcgctggcttccacatgcagatacacaaaatcatctgttttcagtgcttcaatggcagcctgagccttcccttcatagttggtgttatacaatccggtagccccttccacatcaatacagcgcaaacctgcataacggccgataccccgaatcaaatcgacagccgtaatcacggctccttttcggatggacggatatttctctgacaaaggttccatctgcgggcggtatcccggactccagggccagatactattggccgggtctttcccttccgccactcgtttcaagttgacaggatgcgtagccagcaactcttgtgatttcagaatcagtgcattcaacaaatcggctgtttcttgtgcctcaggacagagtgccttcaccagattaggacggaaaggctgcaaagggatgtcatgcggaggcacacaagccaagcgcttatctcctcccttaatcaccaataaatgacgatattgcactcctgtgtaaaaatgaatgcggtcggaacccaatttttcatccaaaaagcgaatcagttcatcagcctcttccgtagaaatatgcccggcagaatggtttttcaacgtttctccttccacacagacaatgttacaacgcatagccatgtccccatcctgaaggtctacgccaatactggcagcttccagtactccacgcccttcatacaccttaggtaaatcatagcccatcacagacatattggccacctcacttcctggatggaagccgtcggccaccgtcttcaatacgcccgtacgccccatacttgccagcttatccatatatggcgtatgtgcatactgcagtaaagttttgtcgcctaaggaaggtacagcccaatcggccataccgtcacctaagataattacatgtttcatttttgtttggtttaaatattggcaatactcattatatccgcaaatacaccggcagcagtcacacttgcaccggcaccgtatccctgaatcagcatcggatattcattgtagcgctctgtggtcagcaagataatattgttgctgccagccaggttatagaacggatgattgcggtctacttcctgcaaagacaccttgccgtgtccatcttccaggcttgccacaaaacgccagcgtttttcctcgctttccagtctcttgcgacgttcttcaaattctttatctaattgtggaatccttctccagaaatcatccaatgtaccttcaaaatagctgtcaggaataaacaagtctgcttccacatcttcctgattcaaacggtaacctgcctcacgagccagaatcaccagtttccgaattacatcctttccgctcaggtcaattctcgggtccggttccgaataaccttcttccttcgcctgacggatagtttcactcagaggagttgtcgcactgatacggttgaaaatataattcaacgtgccgctcaccactgcttcaatcttcagaatcttgtcaccactgtttatcaggtcattgatggtattgattaccggaagaccagctcctacgttcgtctcaaacaaatacttcactccacgctggcgagcaattcttttcagttccgcatagatgtcgtattcagaagaagcggcaatcttgtttgctgcgaccaccgaaacattgtgactcagcaaatctttatacagtgccgcaatatcgggactggctgtacaatccacaaacaccgaattgaagatattcattcccacaatctcatcacgaagagtctgaggacaagaaggaatgcctttttcatccaattcttctctgaaatgttccaaatcaattccggcacgcgtaaacaaggctttatggccgttggcaatacccaccacatgcagtttcaacccgcgttcctgcttcagtttttcctgctggccatgaatctgttcaatcaagctggcacccactgttcccgtaccacagataaacaggttcaatacctgatattctgacaagaagaatgaatcatgaatcacattcagtgtcttacgcaaggaagcaccttccacgacgaaagagatatttgtctcagaagcaccctgcgcacaagcgatgacattgataccgttacgtccgagcgtaccaaacaattttccggcaataccaggagtatgcttcatattctcacccacaatcgccacagtagccaacccaccttccgctttcatcggtgagatttcgcccatttcaatttctttggcaaactcctcattcagcacctcacatgccagttccgcatcctcatttctcacaccgatagaggttgagttctcagaagaagcctgcgaaaccaaaaagacactgatgccattttcggccaacgtcttgaagatacgatggttcacgccaatgacacccaccatgcccaaaccggtcatagtaatcaagcaggtatcattaatagacgaaatacccttgataggtttcgaagaatggtcagcttcctgcttcacaatagtacccggagcctccggattgaacgtattctttatcagaatcggaatattcttatgacataccggataaatcgtaggcggatacaccactttcgcaccaaagttacacagctccatagcctccacataactcaactccgtaataggataagccgtgctgatgacacgcgggtcagctgtcatgaagccatccacatccgtccaaatttccagaatatccgcatccaaagctgccgcaataatagacgctgtataatcagatccacctcttcccaagttggttacttctcccgtattcttatcggtagaaataaatcccggcaccagagaaaccttcggtatttcactgaaagtctcacgcaccagccggttcgtcagctctgaatcaagaatatgcttattatgtttcttttcagtcttaatgaaagtacgagaatcgaaccacactgccccctcaataagcgtagccacaatgatggaagaaagacgttccccatagctcacaatcgtagcagaagttttcggagaaaggtcacgaatcaaataaataccctgaaaaatatccttcaattcgctcagcagttcgtttaccagatccagaagcaactctcttccccgccctgccggaatcacagtgtacaccatttcaatgtgacggttcacgatttccttcatttccttctcataagcatcatcgcccgaagcggccattttagaagtacaaatcagtttatcggtaattccccctaatgcggaaacgactacaattactttgtcatctataccctctactatacgcttgacacttaacatgctattgacagaacctacggatgttccgccgaatttcaatactttcataggttaccattaatttttagtccgaaacccaatggtcccggtatatctccgtaaggccttacactacggcacaaacagaaacaatgaattaaaataaatcttgattgaataaaataattgaaatgtctgcatccgcagacgtgtatcacgtagaaacaccaaacatactatcctcaccccctaggggtcatccctgtggtagatgtaatgaaaggcatatacccatgcccgttcaacaagatgatatgaagacagtgtacagtcatagattattgtttttccgttggcaaatatagcaacatttttctacaaacaaataaataaatgatatttttttgccagtatagagaataagcataagatttcgtacctttgtaaagaattagtgtaacaaatatggcaaaagaaaaaacggtctatgtctgcacaaactgcggacaagaatctcctaaatgggcaggaaaatgtccctcctgcggacaatggaatacatttgtggaagaagtggtgcgcaaggaagctcctgtagccaagcacgtggcacacggaatcgaatccgtgcgctccaaacctcaacgtctgaccgaaatagaatcaaatgaagagcaacgcatggacatgctcgacgaagagctaaaccgtgtattgggagggggactggtgcaaggttcactcaccctgattggaggagaaccgggcatcggaaaatcgactctgatactccagacggtattgcggcttacccacaaaagaatcctctacgtatctggtgaagaaagtgcccgccagctcaaacttcgggccgtacgcattccgcacccgggaaatgacaatctgctgatagcctgtgaaacctcgttggaacagatttttacccatataaagaatgcggctcccgatttggtcattatcgactccattcagacaatttctaccgagaatattgattcttctcccggcagcatcgtgcaggtaagagaatgtaccgcttctcttttaaagtttgccaaagaaaccggcacaccggttatcctcatcggacatatcaacaaggaaggaagcatcgccggaccgaaggtattggaacacatcgtcgataccgtattgcaattcgaaggagaccagcactacatgtaccgcatcttgcgcagcatcaagaaccgattcggtagtacggctgaactgggaatctacgaaatgcgccaggacggactacggcaggtgagcaacccttccgaactgttgcttacccaagaccacgaaggcatgagcggtgtcgccatcgccggtgccgtggaaggtgtacgccccttcctgatagaagtacaggcattggtcagcacagccgcatacggaatgccacagcgttccgccaccggattcgacctgcgccgtatgaacatgctgctggctgtacttgaaaaacgtgtcggattcaagctggctcaaaaagatgtgttcctgaacattgccggagggctgaaagtcaatgaccccgccatagatttggcagttatcagtgccattttatccagcaacatggatgcagaaattgaagcaggcgtatgcatggcaggagaagtaggcctgagcggagaaatccgtccggtcaaccgtatcgaacaacgtatcagtgaggccgaaaagcttggattccaacggatgctgattcccaaacacaatctgtccggcattgaccggaagaaaataaaaatcgagctcatccccgtaaggaaagtggaagaggctttccgggaattattcggatgaccctcttcacaccataaaaaaacgcctgtgcgctttgaagtattttccatgcgcacaggcgttttttattcagtatcctatctcaatatccgttatttctgaacggcattttcataaggaaccatttttttcaagtttgcatttgccttttcaggttctacgcttgcagctttctggaaccattctttagctgcttccgtatttccagacaaccaagccaatacacccaagttattgaaggcacgtgaatcatctttcaccttatccatataagatgctgcctttttaaagtcaccgctgataatattggcagaagccgcattaatgttagcagtcacatcttccggataagtgttggctgcaatctcatacacttctttatattcctttgttccaggctgatacatacctgccacacgatacatttcctgcaagctcaacaatttcggattggtataaatcaggcgggcagcttctgagttcaagacttctctcacttcgtaatctaccgatacactcaaacgacgcaaacgaggataatactggttcatcatcgtacgataagtagccatgcccagtgtagatttcaatcgagcttcacgtacatccagattgtcatatttctgaattacagccaaagccttttccgcataagcaggttgatcttcttccagcatttttaccaaagtctcccaatcctcacccgcagaagtcacatgcaacacttccttcgggaaattatatccgcctttcaggttcagcgcaaacgattccgcacgttgcgtggccacccggtcattcgtacgaaccgaaccatccggtgaagaatatccgcacacattgattgacttaaacgtcaccaaatctccatcttccaacggatccaaaatctctttcatcttctgcaattcgctacgattatttttataattcgcatcaaaggccgttttccctaccggaaattcaatatataacgtactttgctcagaacgtaccttcaacggttcttctttcggagtcaggaaagaaaccatttccttgcaaggatcacacacctcaaattctacaggcagagccggagtttccacagccacatccggttcaatcaccgtaatatccagcaaatccacctcacagcattcttttccttcctgcaacagaatcatggaagcatggtccatccatgcctgataaggaacagaagcctgatagcgaaccacatcctcccgattttcctgacgtccgtgaatcacaacaaaaggattatcaaacccgaaacgacgagccattttccgctcctgacggcgcattttgtaatcaccgttctttccggttactactaccggaggcatggcgtaatagttttttccttcacgcaatacaggagtaaaggcatacgtctgctcactattcacacgcacatcttccacactcatggaaaactcaacaatcagcgtgtcgttttttaacgtcaataccggacgtgtatactttatatcacctgccatggcaaccagcggcaacatgacaaacgacaatatatatgctatttttctcatatttacttgtttaaaaattataatgactgaacttctacacaacggtgttttgtcttatacttcggaccgaaagtaaagttgattcctaaattaatattggcagagaaacgattaagcggcaaactaagactcggctttgtatatttacacaacggcacatctgctgccacaaagaagttgaaacctctcgggtgaaaattcaacatcaatcctcccgtagaaccaaagttagaaagggcatagttcactgaagcctcaaaccaggtcagaggagacacattggcagagacacgtgcttccgtccaagagtgacgtccctggaaacgagaagaagacaagaaaccaaacttcaagcggtcataagcaggcaatgtatattccgcaccgaggtttaacgtagccgccaacgctgtagtacgtttcagtccctctccctcttttgtaaacttagacatctgttccaggtcatctacaatacggtcgctctggttatcaattgaattagggtcattatctcccaagtctgatttcaccggaatttcattaaatccatcaaattcaaagctattgttcatggtagctttgaccgtattcttccaacagatgaatcccaaatcaagcaatgcagcagagaatgtccattcatcattcagacgataagtcgcaccgaaatcaaacgccataccaaatcctgtaggaccgatattgttatcatcaaaatccacatcatcatacgaaattaactgctcagaaccaggtttcagtttatcggtgcgattgccattggcatccagttcataatcactttcatcataattgcctgtttctccacgagtcggcactatcaagcctttggcagacagataggcttgcgcacccgacggagtgattttccaagcatccggagtcgcttcaatatccagtcggtcaatctttacagtagccttagcaagtcccaccaggaacttcattttagcacctactgtccactgatcgtttatctgacgtgcatgtcccaatgccagttctgcataattcgtcgaaagaatgctcaaatcgttaactgtgtaacgcgttccttccggggcatccactccattcttcataaacttaaacagttggtcaggagccgacagattggtgttacttttaatagaaagtcctatcgtattaaaacctccccatgcataaaatccggtagacaagatattctcattgacattaaatcccattttcaaccggttaggcaaaccattcaggaagtcttttctactcacttcctcatgcatgaaggtcatcaagtcaccattggactttacaaacagaaagtcgcctacacctgcagttccttgagctcctaccgacaaattacccaacccgggcatgctcacatatcctctctctcccataaatgcagggttcagttcatgacgataggtagcacctcccaaaaagtaggcagaacgattaatctgaggttgtgctactgcttcccccacaaacgcaaaaacagccaatccagacaataccgtacacaatatatttttcttcatttgtttcattttttcccgttcattattaattcaaatccacattcacaccacccggtacagacaatttgatacttgttaccttcagccattgcgtatctttcaaaggtacaccagtagcacttcccggaacagctgtcagtttaaagcaaatacgatcaatcttcgacaagaacgccgtatcctccgaagtcagattcaaaaccagctcgctggtcaccggtttttctccatccgtactttctgtaacatactgtttatcctcttctattgttttcttcacagcagtcaactcattaccatacacatctttaatcaacacgttttcaggttttaactgcaatttcaatggtatggcattatctaccgttaaaagaacattggcttttttcagaattaccttatccaaatcattcaggtctttattcaaatcttgaacggaatcattgtacacaatatttaagttctgctcaaaactcaacggcacatctacttcataacttgaaggcatttcgtatgctctgcccaattctgcagtataataaccttcattgcggacaacaggctgtaaatccacctcaatgtcatccggaattgtttccaacaaatcatttatgtcttctactttcacgttactcgtcactccctcgattgtacattcaccagtacgagaaagagcaatcacatttttacccgacgctaataccacaggagttttgccataaccgcttcccacttttacttctttaccatcaatctgagcattacctttcatcggagtaagtacggcatcaacttctaccggtgtctccaattgattttcggctctcagcagaatcaccggattggtaatgtccatacgagtttcttcatctttcaagaaatcaggcaaatcgttcaattctatattagtagtttccgctttaatctcaggctgaatgactccggttacactgtttgcggtcatttcttccaaagtaacatccaaagtcatagtcaaactaccagaaccattaattcccgaagtcaccacctgtccttgcattgtaactaatccattaattgtgattgttctatttttatccggtatttctccttctccagcctttcccccaaactgataaccgattacatgcaataccttctgtgcatttttcagttcctcattattcaaaataagtttattaccttcttctacttctcctttttcaaacatcaaaaaatctggaagttgaatttctagatttttagcagttacagagccaaatgttaagttcccagtatttaagaactcaaatgccaaagttaaactcgtaggtgttttagctcctaaagcacctaattcgattaaagcctcatctatatcacttgcttctgctctcagattattttttacatccaattctgttgttttacttccagaaccaccatcatcagaacctactaactcttgtttcaaatcagtatttgcactactaatcgtcacctccttcaccgtagttggatccacatcaatatcatcccttttcgtcagatggtatacacgggtagcagcatcaggttgaagaatatctccttcttccacctcaataattttacttaagtaggcggtatctgaactaccagcaggaattgtgagatgctctcctcccacattaattgtcatgtcaatgtccttatcaagatcatacttgttatccacacatgacaccgtccacaacgggaacgacagcaaaaggccccataaaggatacattttttttcaccttacacatcataattttattttaactaaaattcaactatcattatcaataacgtttctccacttacaaatgttgggaaaaatcgaccacaaatatagaaaaatttaccatttcccctgaattaaagtcttaaatcagtataaaatctcccattgacttccttttgcaagaacaaaacagaaatcctatctttgcaaaaaagttacaaaaatatgattcacgaataccaactccggattctgcccgaacaggcagccagcgaacaatcactcaaacaatacatcggtcgagaaaaaggtttggacgtacgtaccattaatgccatacgtatcttgaaacgaagcattgatgcgcgtcaacgtaccatttatgtcaacctgaccattcgtgtatttgtcaacgaaacaccctctgaggaagaatttgtacgtacggattatcccaatgtagagggtcgtcctgcagtcattgtggtgggtgcaggtcctggaggattgtttgcagccctcaagctcatcgaattaggccttcgtcctattgtggtagaacgaggaaagaatgtacgtgagcgaaaagaagacctggcccgaatcagccgggagcacaaggtagacgctgaatcaaactacagctttggagaaggtggagccggagcttactccgacggaaagctctacacccgcagcaaaaagcgaggcagcgtagaaaaaatattaaatgtattttgccagcacggagccagtcctaccatattgtcggacgctcatccgcatatcgggacggacaagcttcccagagtcatcgaaaacatgcgcaacaccattttggcctgtggaggagaagtacacttccagactcgaatggaatccatactcatagaaggtcaaaaggtaaaaggcattgaaacgaataccggaaagacctttttaggccccgtcattttagctaccggacattctgcccgagatgtatatcgctggttgtatgcccatggggtgcaactggaaaccaaaggaattgccatcggtgtgcgactggaacacccgtccatgctgattgaccagatacaatatcacaataaaaacggacgaggaaaataccttccggccgccgaatatagtttcgtacagcaagtagacggacgaggagtgtacagcttctgcatgtgtcccggtggatttgtcgtaccggcagccagtggtcctcaccaactggtagtcaacggtatgagtccgagcaaccgaggcaccaaatggagcaactcgggtatggtggtagaaacacgtccggaagaccttctgctcccggaaatgcaactccaggcggaacctttccccgaatccaatgaaagcctgacggaagaactgattctgcgcgacggaaagcagcctgaaggtaccatccatacattagccatgatgcgtttccaggaaaaactggaacaaatctgctggcaacagggaaatatgcgtcagactgctccctcgcaacgtatggtcgatttcacacgaaagaaactcagctacgatcttccggctacctcttatagtccgggattagtatcttctccccttcatttctggatgccctctttcctgagtgaacgcctgagcaaagggttccagcttttcgggaagagttcacgtggctttctcactaacgaagcagtcatgattgccgtagaaacacgtacctcctcccccgtacgtatcgtacgcgataaagataccctgcaacatcttaccatggaaggtctcttcccctgtggagaaggtgccggatatgccggaggtattgtctcagcgggaattgacggagagcgatgtgctgaagccgtagccaattatttaaaccattaattaccttattatatgcaccacctgccagaaatagccatcattgagcccaacacgctgacggccctcggactacgtacgattctggaagaacttattcccgaggcagtcatacgtacgttttcttcttttgaaaaactgatagacgatacacccgacatgtatgcacattattttgtgtcggccaatgtgtattttgagcatacgtcattttttttagaaagaaagcccaagtgcattgtactctctgcaggagaacctcccttgctgacaggtattccaagcctgaacattcttcttccacaggagcaactggtaaaaaccatcatgcagacccgaaaacgaggccacgagctgacgcatcatcccgtaacgcctcccgccaccgatgcagaacatgaactaagtgcccgagagattgaggtgctcaggcttgtgactaaagggttaattaacaaagagatagcagacaagctacacattagtctgactacggttatttcccaccggaaaaacatcacagaaaaattgggtattaagtccgtatccggcctggccatctatgcggtcatgcacggatacgtagaagccgacagtatataaagtttatttaaataacttcggcaaccaattattcaaatattttcgccagttgcgccattcatgcccgccatccgtctctgcatattcatatttatacccatgacgatcaagcaactgacgaaactccacattgtcctgatataaaaaatctgcatttccgatagctataaaatacagttttggagctgccgcaaactgagttgctaacttttcctccagattcttatagatataagtgttctctcctttcgactcacggttaattgccgcagaaaagagtcctacataatcaaacttgtccggataattggcagagatatacaatgaatgaaatcctcccatcgacaatccggcaattgcccgatgcgccttatcgtttatcgtccggtaatgactttccacaaaattcataatatccggaaatgctttctcataagacccctccatggttttcggattcatgaaagaaggtttgtacatgctgttaggatattcccccggtacagcctgctgtgccccatttccattcggcatcactacaatcattggctctgcttttccttgtgctatcaaattatccaagatctgtacagcacgccccagttcactccaggcattctcatctcctccggccccgtgcaacaaataaagaaccgggtaacgttttgtcccttcctcataaccagctggggtatataccatcatccgacgacgttccatccccaaagaagggctcggataccacaccttcgcaaccgttccatgaggtacttcccgaacaaaataattctcagacaaagctccatccacaagaaaatagttcatgtaagtagctatatcacgaagcatatatacattggaggggtcaagcatacgcacgccatccacataaaagcaataagtatgcagttcgggcgcaggcaaagcaaccgtatagctccacacaccattctctcctttttccatccgttgacgtcctgccatttctacctctcccaatggagtctgctgtcgggacttttcaaagaagtctgtttctacccatacttccctggcctcaggagccagcagacgaaaagtcacagtttgattctttacttcgggagaaataagatctcccgtattgacagccacagtttcctgtgcccaagcggagagcgagaaaatacataccgctaccaaactcaaaaattgtttcattcttttcatacgttaatcctattactacgtacaaaaataagcaaaatcctcatttattaggattgcccgtccaagcaaattggcgttactttgcagccgttaactaaactatatctttcaacagaatgaaaaaaaatattgctattgtttcgttactggctgtttctataaagagcgccttggcaggtccggtatcacctgagaactctctacctaaagatacaacaaaggttattgacatagaagaggttgtggttattgctactccgaaggagaacaaccgtctgcgtcagcaagccacttcgtcaacttccttctcacaaagtgcaatgcgcaataattcggtaacctctgtaaaatcattgtctgcactggttccgaacttattcattccagactatggttctaaactgacgacttcggtttacatccgaggcatcggctcgcgcatcaatacaccggctgtgggactttatgtggacaatattccctttatcgacaaatcggccttcgatttcaattattctgatattgaacgtatcgacgtaatgcgaggtccgcaaggaacgctctacggacgtaataccatgggaggacttatccgtgtgtttaccaaatcaccgtttacgtatcagggaacagaccttcgtttaggtgctgccacctacaacaattacaatgcctcacttacgcattaccatcgtatttccaatcagtttgccttttctgtgggattattttatgaccataaaggaggtttcttcaaaaacgactataatggaaaacgaattgatacggacaatgagtttggtggacgtatacgtgccatttatttgccgaccgaaaacctgaagcttgactttaccgtgaactacgaatataccaaccagggcggctatccgtatgaatacacaggtaaagtcagcggagaagaagaccgtgccgactacatcggccgtatctcttacgacaatgcctgcggatacaaacgtaacttgctgaacaccggactgaacctggaatatcaagccgacaatttcattcttagtagtgtaaccggtttccagtacctgcgcgaccacatggacctggaccaggactttacggagcagaacatctacaccatgatgcagaagcagaattccaagacacttagcgaagaaatcgtattgaaatccaaacccagacgccgctggcagtggactaccggagtgagcggattctatcagtggctggatacagaggctcctgtcaccttccagaaggatggagtaaactggttgaattctaccatcaacacaaacgccaataaatacatgcccacgatatcaatgggtcccatgagcatgaagttaaacttcaatgacataattaacggtgaacaacttgcaattccaggaaaattcagcacaccgattttgaatggtgccattttccaccagtccactttcaacgacctgttcgggctggaaggactctctttcactgccggtctccgtatggattatgaaagcctgaaactggattactacagtggttgccaatttacacatacctactcattaggcggaacgttgactccatccaacaaagtaatagagatgattccggcaaaagaattcaatgtaaacaacagttatgatggaaagctgtcgcacgactacatccagctgttgcctaaattcgccttgcaatatgattttgactcacgtaacaacatctacgcaagtgtatccaaaggataccgttcgggagggtacaatatccaaatgttctccgacctgctgcaaaatgacatgcaggcaagtatgatgaaagacgtagcaggcgtaacgattccagctctcgaatcagcgcccataaaggatgaacagaaacaaaatattatcggtattctaaacggtatggctcaaagcccgcaaacagacgtaaaagcagccacgctctacaagccggagtattcatggaattacgaaatcggatctcatctgactttgttcaacggaaagttacaagccgacctctcagctttctacatggacactcgcgaccagcagttgtcacgctttgcagaaagtggattgggacgtatcacggtaaatgccggaaagagccgtagcttaggtgcggaagccagcttacgcgcacagctcactgaccagttcagcctgaacggaaactacggatatacatacgccaccttcactgattatgtgataagtgaaacagagaattataacggcaactatgtccccttcgttcctaaacatacatttgccgtaggcggacaatacattttcccgctgcgcaagaacgctattctagacaacatcaccctggatgccaactatcgcgctgcaggccgtatctattggacagaacaaaacaatgccagtcaggcactttacggcacactgaacggccgactcagcttgaacaagggtaacggacaaatcggtttctgggtaaacaatgccttaaacaaagattatcaggcgttctactttgaaacaatgagccgcggcttcgcgcaaaaaggacgtcccgtacaagtgggaattgacatccgttgccgcttctaaaaaacgcaaggaggttttattcaaaacacaagtgcgtttcaactaaaacgcaagtgcatttaagacaaaacgcaagtacgttttacatcaaacgtccttgcgttttattatatagaaaagccctattccctccttaatcaataactaattgataatcaagataaacggaattattccaaagagctgtttttccgtggaagcatgtctgccgaagggcattcatagttactaatcggtaattttacctttttcaattctttcaatttgaatacaggagcctctaccccttcaggatacttcatgtgagaataggtacgaaaatattccagacacgcatctttccaccataccgcatcattcgcctgaatatccagccgtttagccaccgcctgaaaacgctcctcatccacatacggtttcatctggttccacactttctggaactcacgcactttatcaacgccttgctgatatttataacacaattcatcccaaagagtacgtccagactttaatgaatgattccaatctacatgatgaaaccacaacaaaaattcttccggacatagctccaatgaattgaatacgtgggctaaagagtctggatactgagacaccgcatcacttccagaacggctccggtcaaatcccaaaccttttttgtctgcctgatgataatacgacggcaaccaatctgcacgagcacccgatacctcacaccagggttccggtccgtaatgatgactccaggcaaaaatatgatgtaatcctaacggcatcatgtaatctaccaccgcctcccgactatccatcatgacttgcgtcatgggctctacgaatttagggtcggacgtaaaagtctgtgccagccactctttagctatttcttcagaagaaagcaaaggattccatgccaaccgaccatacgcataccagttagcctgcgcaaaatcatgtccgcaccagttggtatcatcacctatattggccactccagccaccccttttaaagaagcaggagacacataacgataaaactccttccacatagtagccaggtaagccagatgattggaatgccctaagtactcctgtgtaacctgaaattcagccatcaacggggtgtggggcatcgcaccaaacaacggactgtaaggttctctcggctggaagtcaatcggaccgtttttcacctgcacaatcacattatccaaaaattttccatccaaaggtttaaactccagataagcctgtttggctctgtcggcatccgacggactgtacacaaacgcacgccacatcacgattcctccgtagggtttcagggcccttgccatcatattcgctccttcggcatgcgtacgcccgtaatcgcacggaccaggctgtccttctgaattagccttgaccagaaaacctccaaaatcagggataagactgtaaatctcatgtaccttcttcttccaccactcagccacttcctcattcaacgggtcggctgtagacaatcctcccaactgcatgggagaagcaaagttgaccgaaagatagacttttattccgtacggccggaaaatatccgcaagcacgcgtaccttttcaaggtattcgctggaaagtattttaaccgaagcattgacattgttaagtactgtcccgttgataccaaccgaagcattggcccgggcatattcctgataacgtgccgacacagtatctgaaagttcatcccactgccacaaggatttaccggcatatccacgctctatcgtgccatccagattatcccaatgattcagtacacgtacatcgaaggctggttcttctgcaatatccagacgggtacaatctgccccttctgcctgcaaacgtaaaagatgataggccgcataaagcaagccctgttcagtagtagagccaagcactatcttttcatcggaagtacgtatggtgtacccttccttccccagcttacgatgagcttcatcagcaaacagttgtagttcaaccgcctttccacaccataaagaagccagttcctcacgagctatggcaatggtaggagaagaaattgaacaacagacagacgccttttcacaagacgcctgtcgcaaccagagtttacttccatcttccgcaaataaggtcagtccgaaagacaaaagacatatacccaacaagtactttttattcatccgcacttccttttatggtctgaatcttaccctcttcatcgtattccaattcaaccacttttaaactgcgaagccaggtctttccacctgaaggaacacaatcatgatggaaaagataccactttcctttatattctgcaatagagtgatgggtagtccatcctactaccggagtcagaattactccctgatatgtaaacggtccataaggattgtcgcctaccgcataacacaacagatgggtatcgcccgtagaataagagaaataatatttacctttatatttatgcatccacgaagcctcaaagaaacgatgcggatcgcctgcaaacaaaggtttgccatcttctcccaatacgatgaccggacggggttcttctgcaaattccaacatattatccgataattttaccacacgactgggcaaagccggttcattatcagccgggagacatggactttcaatggctttgttatcacggtaacgctgcaactgtcctccccagattccgccaaaatacatgtagtagcttccgtcatcatcgcggaaaactgccgcatcaatactgtagcttccacgaatcggatcgggctgaggaataaacggaccttcaggtttatcgctaatggctacccccatacggaaaatatcattccggtctttcaacggaaaatacaagtaatattttccatccttgcaggcaatgtcacagtcccacagctggcgtccggcccaaggtatatcagcaaccttcaaagccactccatgatcgacgatttcaccatgcatcacgtcatccgtcgacagtacatggtaatcattcatatcaaaatggtcaccgttgtcattttcaggaatacctgattcacggtcgtgtgaaggataaatatacaaacgtccgttaaatacatgtactgacggatctgccatatagtcggcaggaaacaaatatctttcttcctttttcatttttatattgatttatgagactcttactgaaagcgtctcctgttaaacgttatttctgtgcaatagctgtcgtatccgactgctcatccatcattttctgtataaattccttaggttgatagttccggtcaaaaagcaacggatagtctcttcttccacgaatcgggaaatcattcttccacgaatcactatctgtaactccccatgccgttacacgcgtcacaatatcggcatgtttttcaaaaagctggaagaactgctgcattcttttattccatgcctggctgacagaatcagggagttcctgcggataaggattcaatgttttcttaaacgcaaccgtatccgagatgttggcgctgcgaagtgcagtaggcagcgcactcatatcccattctgtaatcatcaccttgacaccagctgaagcaaaagcaagcatactttcttcaaatttctggatgtcggggtaatccattcccatgtgtccttgcatgcccacagcatcaatacgcaatcctttttccttcaatgaacggacaagcttcacaactccttcccgacgcccctgcacgtccataccataatcattataataaagttcggcatccgggtcagcctcgtgcgcatactggaaggccagtggaataaactcttctcccaagatttcataaaatttacttttgcgataggagccatcttccacaatagcttcattcaccacatcccagccttttacttttcctttgtatcgtcctacaacggtctgaatatgcgttttcatacgctgtttcaacttttcaggagaaacattctgacctttttcatctacgcagaaccagtccggaagctgagaatgccacaccaagcaatgtcctatcaccgtcatgccattgtcaattccgaactgcacaaagcggtcggcatcctcaaaatgaaatactccttctttaggctgaatctcctcacacttcatacagttttccgctacaatggaattgaaatgctgtttcacaatcttcactgctgaagtatcagcaccagatgactgacgtacattcagcgctactcccattaaaaacttgtctcctacaacctctttcaaagatttctctgatacaaccgtatcagaaaccttactcccgcatcccataataaacaggctgcacagcatccatgatgcaatgtgtttgttcttcatatattctttccttaattaatagtcacttttacttcttcgagctgttaattctgcctgcattttctcattgtattctttactgataggatagaaacataatgccaccacaccgacaaaaaagaatgcggctggaatcagacttgatgaaagaatgatgccatgaacggctgtatcactttgagctatatccgctccagaaacataaccaaatcccgacagcaagaagcccaatacagctcctccaatacctaatccggctttcagggcaaacaccactcccgaaaagataaatcccgtagcacgacggtaattgatatattccgaatggtcggccacatcggcaatcatagcccaaagcaaaggaaccgttggtgcataggccaagctcttcaagaagttcaatacgaacatcatttcaatatcgtattttgaagggaaatagaacaaagccgtgaaaatagccgtcagcgcaagacatacgataaacgtacgcttcttgccatatttgttggctaaaaattctgacaaacaaattacgccgaaaaactgaaccaaagctcccaccatattaaatacgccaaagcccacttcgtatgctttgtccggagaagttacaatcaacccgaaagcatcaagtatatgatacccgactgaagttccaccgtcagtggctaccaacccgatattatccaggaaagtaaacaaagctgccttatccacatagttttcaaaataatagttcatggcacttccccacatagccagtgtgatgaacacaaaaagagtcaagacaaacatggcacgccagggcacactgcttaatacatcttttatatcctgacgggtatcatttttctgattggcaggcggagtaatacgttcttttgccgagaaaaatacaatcaccaaaaacaagaaacctacggcagcaaacaaggatatggtacagagccagccatgtgccttgtcactaccttccgaaaacttgctgaccaacggtaaggtaagcccttgtaccacaaactgtgcaatcgtagaaaagacgaaacgcacagaggtaatactggtacgttctttaatatctgacgacataactcctcccaatgaagaataaggtgtattattaaaagaatacatcgtcatcagcaaggtgtatgaaattgtagcatacaaagctaccagtcctttttcttcaatacccggattgtaaaaggccagtacatagaacaccatgaaaggaagtgctgtccataatacccatggacgatattttccccatttcgtctgagtccggtcagacaaaataccgacagtgggatctacaaacgcatccacaatacgtgctaccaacatgacggttcctgcaattgctccttccagcccaaacacatccgtatagaatttggtctggtaaatcatcatcatctggaataccagatttgcggaacagtctcctaatccatagcccaccttttcggccatggatactttctgattctgaatcttactcatatctgtttattatttttcattctgtattactgcttccaccagacgggtagctgctgtttttttatccaaagggtgaatgtcattccattctcccgtatcactattctttatcagtgtaacgtgtgtattctcacgggctgttttcgcctgctgttttctcaactcagcccatgctgctcttcccggatcatccggtgccaggaaatcagctaattcaatgatatagaaaggaagagtttcatctttgaaaagtgttctccagtcggctatcaatgcaccgagcaaagacgaatattcgctccaacggcccacatttgactctccctggtaccacaccactcctttgaacgtataatgacgtaatggataaatcatcccattatacaagccaacaggagtgtaatgaaaggctgtagaagaaggagaagggggcatcaccgtacctattttgtgcttccatcccccttccagatttacttctttcccgtcacaaatcaacttataaggcttttcctttacaaaagaaggacgtcctccataactaaacaaccgtacagtaagttgattttttcccttcttcagcaacttggaaggtactttataaatacgaggaggatactgataggaaacagtgccgacgaaatgtccgtttacaaacacagagtctgcatccacaatgcaccctaagcgtaaaacggcttcttttccactccagtcctctggtacaaaaaagtccttcctgaaccaatgaactccgttcaaaggacggccattacgaatggcccagttatctgaaaacatatctaccttttcccaatccgaatcatcataatcctccgcataccaaggtgtcacaccatgaagtcctgcatcagacttatacaatactttattccatgcctgttgatgcagcctttcagtttctgttatccgagaaactaattctgtatcctcatacaaggccttctgatgtacatactccggaaagttttgcaatcctttttcactaacccaagcttccaccggagtacctccccaacttgcattaataatacctaccggcacattagtcttttcttccagcaaccgggaaaagaaataacatatcgcagaaaaatcttttacattttcggtcgtcatcggacgccaggttacaggacgaatatcttctttctgttgagaaaaatcatacgaataaggaactttcacatatcgaacagaggtattttcatatccttctatctcgtctgcatatttatccatcactcgattaaccggaagttccatattagactgacctgaacataaaaagacatctcctacgagaatatcatttaaaacaatgtcgttaattgtcatagagtaaggtcctccggctttcatggcaggcagtgttacagcccatttcccattctcatccgccgttaccttatattgtttcttttgaaactttacacaaaccttctcagacggatcagccttaccccatattgttaacggagcatttcgctgcaacaccataccgtctgataccagcacaggtaaaaccacctttgcaaaagctccaaaatcacaagaagcaagcaaggctaagcctaataaaaaacgtttaataataaaatgtgttttcatatacttttcattgtatttttcactgtaacaaaaatacggaaaggttattaatacgtatgtccgacaggataccaagcttacatctatggttacatttcattttctattgtaacaaaaagcatatgtatatgttacaccatctctacaataagggtattaacgtccacatacactgcttattttaagcaccgccctataccagaaactctataaaatatctatttaattcctttacttttcattgagaaatgaaaaaaaagaatttactttgcatcactaacaatacgtacatttcaacaaacttatccattagggaaataaccaagtgtaaacttatgatacagataatgaaaaacaaaacctttattttaatcatctttctgtgttttctacctcttttttgtaaaggacagttttgtaagttatattcaactcatggagatatatccagcagtatgattagtcatatataccaagacgctaagggttacatctgggttgcaacagaaaatggattaaataaatatgatggagctaaatttaccaactataagaaccaattcaatgattccacctcactgcttgggaatcatgtatacagaacttttcaagacgccaaaggacatctatacatactttccaccaaaggattacaaatgtatgaatataaatccgactctttcaagactatcaaaaaatccaattcatcatacaacaataaaagtatcgcacaactcagcgatggcagtatcttaattggtacaagtggatatggtatcaaaaaactcacttttgaccataaaggaaatattcaaattgagaattggaatccatctttaattggacatacaatcaatgatatcatggaagaccgtaaggggaatatatggatttgcacggaatatcatggtatgatcagaattgataaaaacaaaaagattcatcattatactcttggaaaactctatggaaatcaatttatcaattgttgtacagaagactcaaatggtaatatatatgcaggaaccagcggacgaggagtttttatatacaatcaggcggataatacctttcatcaaatatttcattccaatttccccattaaagttcttaaacaaaatgagaacctcatgctgattggcattgatggagaaggaattgtagcttatgacatttcaaaaaaatccatagccaacacggatttttacatagacaacataaacatcaagaaaagcaaagtacattctttgctgacagacagcagcaataatctttggattggtatctaccagaaaggagtagcatttattccttcacaagcgaatatgtttaactacatcggaaacttctcatctatccgaaattacataggaagtaattgtattacagctttgtgcgaaaccacagataagggtaaactaattgtaggtacagacaatgatggtatttatttattagacaaaaactacaactttatccaacatctaactcaagataaaaacccggatgttcctcctaccgtcatgtgcctttttgaagactccaataaaaaggtatggataggttcataccttagtggaatatctgtattcgattcgcaaacaaacaaactttcaaaaacttcactgcgaaataatgaagggaatgaaataacaaaagtatatagattcgtagaagaccctcataaaagattgtggataggcacaatgggaacagggctttattatgtagatttaccagcttcatcggcttcttatagtgacctgaaagtacatcaggctctatcagagaaagaaatcaatcaatggattaatactttattgtatattccaaacggacgattgtatataggtacttatgatggtattaaatgcatagatactgagaagctcaaagtcgtaggtaaggaaaaagtgctcataggcttaagtataaataccattgcacaagggccagacgaccatatatgggcaggaaccccggaaggaatctatgtaatggattataatttgaatataattgagaaatttacaactcacaatggactccccaataatctgatctcatcaatcattgtggataaaaacaaggatatatgggtaagtacaagtcagggaattgccaaatataattcacataacaaatcgtttattcctttctttgcatcagacggattatacaataatgaattttcaagaaatgcctattgcatatctcccgacggaaaaattctgtttgggggaaccaatggcattgtcttttttaacccgaatgacatcgaaacacagaagtttcaaagcaatataagaattaccggtttctatctgcatgataaagctgtcaacgaaatgacccaatctggaagttatcatgtgatagataatgatatatttcatacccaagaaatcaatctgtcccactatgacaattcgttttatatagaatttgctacagacaatttcatttccccacagaactatttatattccatgaataatggaacatggaactctttgcccaaaggaagctcccgtgtttccttcagtaatcttcctgtaggaaaatacgaatttaaagtaaaagcaatcaatggcacttctgaatctaaaataaagacaatagtcattaatatacatcctgcatggtacaactccggtctggcatgggttatctatatcttaatcatcattagtataatagccatcttcatacatcaggctaaagaaaaatacagagtaagacaggagatgctaaaacacaaacatctggaagagattaatgaaagtaaattacagttcttcattaatatttctcatgaaatcagaactccgatgtctttaatcatcagtccattacagaaattaatctctacagataatgacagcgaaagacaaaaaagctattcattgatagaacgtaatgcgcaaagaattctaaacctgatcaaccaattaatggacatcagaaagatagataagaaccaaatgaagctaagtttcacagaagtggatttaatcagctttatcaatgacataaaaaatacatttgcatatcaagcagctgctaaaggagctaaattaaacattataacccaaatggagagcctgaaagtttggctggatcctaataactttgacaaagtaatctttaatttactctcaaactccttcaaacatatccagaatgaaggagaaatcaacatatatatcaactccgtcaataactcttcaaatgtttatccattgaataactatgcagaaatcattattgaagacaatggaaccggcataaaggaaagtgagatggaacgtatttttgaaagattctatcagataagcgatgaccggtcacgaagcaaaggaaccggaatcgggcttcatctatctatgtcgctcataaagatgcatcatggtactatcacggtcaagaacaatgaaaacaagtccggatgtagttttaccatccatattccattgggatgtagccatctgtcaaccgaagagctttatcagaatagtaataagaatatttcagagcaaccatccattgaagatcagcctctgcaacatattccggcttctattgaagaaaacgaaaatagcgaagacggcactaaaaaagtaatcaggaaaaagcattctatattaattgtagaagatgaagatgagatacgaaattatctgctcactgaattaggaagtcatttccgtgtgttaagttgtagcaacgggaaggaagcactcgaccttattatgcaccacatgcctgatttggttctaagtgacatcatgatgccagaagtgaacggcatcacgttgcttcgtaaattaaagcagaatatcaaaaccaatcatatcccggtaatccttcttaccgccaaaaacagtgaaaaggattatatcgaaggactttccctaggagcagacgcctatatagccaaacctttcaacctggatattttaataacaactattgaaaacctgattaaaaacagagaaatattacgcaataactttagcggaaaacaagaacaaaacgacaatattgaagtggcacaacctcagtctgcagatgaaaagctgatgcaaaaggttctaaaagtaatcaataagaacctgaataatccagatttaaatgcagaaatgattgcagccgaagtgggtataagtcgtgtacacctatacagaaaactaaaagaactgaccaaccagtctacccgggattttatcaggaatatcagactgaaacaagctgaaatcctgctgaaatctgagaagaattacagtatgtctgaaatagcccaactggtaggtttcaacaatacaacttacttctccaatgcattcaaagaattgtacggagtatcccccagtaaatatacggaacgctgtaaagaaaaagaagaggagaagaaagatgaataaaaagagaggagatagacggggttgaccgagtctatctcctctcttcgtataataccctattacttactctttttcaaaagttcaagcatggtaagggcatatctcttgccaagttctctatagccagctgcactaaaatgcaatcgatcggatacggcctcacatccttcagaagaaaccacatgtactacaggaatcgtttcaggtaatttctgaatcaccggattcatcgatgcacaagctcccccttgcccttcagaaacaagctcaccaactaaaagaggcaatgagttaggctgcaaaccaaggtctgaaagaatattatcgtatactttttttaccttcatcggccaatccggatctccggtattggattctccttgatgaagaagtataccttttataactccacaccgagaagcttgtttagcaagctcgattaatcttgcataaggatttccatcatactcagcgaccatattttttaaccaatctggagatccggccacatacgaagcataattatccttatcaaataattctattctacatcctcccacagccacattaataacacctatttctacatcagctggaaggctatctgccaatgttcgtccaaaatagtctgctggagttaaacccgttccacatcttgccaaaggaggaacagcagtgtaccacttacctttttcccgtcctaaatccgggcaatctacagcttgaagcaccttgaaacgcggagttacattcaccgtatcacacgcttctatttttgcatttccctccatattcgactgtcctaaacaaagatagatatgaaacttctcattcaccttctcggttccagtctgagcctgtgcagaaacaggtcccaaagacaaagccatcaatgatgtcaatgtcacaaacattcttttcacttccattagttcaaaatttatattcaacagttatctctatttatttttatcaaaaagctatttttaactcctcacccttatagactacagacttttctgttacgttcgattttccatctgaggacaaggctatttttacaatcttaaggttccgcaccggttccatcccctcatactgaccactccgtttaccaataatcaaaatggaatgcgcatcatcccaaaacagacgaatgcaagaatatcctcctttttgatagttgtagtctgtaccttcatcctcatacaattgataggttccatctgttcctgcataaacacgtatctccaaatctgatttcaaggctttctgcgcattttctgcatatcctgatgacaaaggcaagacagtgccagccttgacaaatacaggaatgtagtccggagagactgaagtctgaacccaacccgttgacatatactggttgtcatggaaatcataccatccaccctgaacggcaggcaggtatgtcttccacacgacaggtccctcttccactataggagaaaccagcagaaaccgaccaaacatatattgatatttcaaagataaagcttgagtatcctgagggaaatccatcatcagaggacgtaacatcgtaccatttcccaatgagacacatgctgcttcagaatagatatatggtaaaaggcggtaacgcagctccaatgatttacgagccatatccgtcactttatctccataattccaaaactcagtattggtcatatacccatgtacacgcatcaaaggtaaaaagacagaagtctgaagccatctggaaaaacgctcatgaaaatgtgcatctgtatactgtgcatcgcccggacgaaagaatcctccagcatcataagtccaccaaggcagaccacaaacagaaatacccagtcctgcaacaatctgacgacgaaatgtatcccagtcattcccgacatctcctgaccaagtagcaaccccatatcgctgaatgccaggaaatccgctacgggtaagcagaatagtccgagaaatagaatcactttgttttccctcatcagtggaaagacctcgtaaaccttcatatatcgttttgttgaccacaagtggatacacattccggaacacttctccggggaaagtggaatggtttaccctacgtcctaccaaatcgtcattttccggctccgttgcatccagccaccaagcatctattcctatcggaagcaccagactatcccgaaagttcttccaataaaaagaagcagcttccggattaaaaaaatcaacccaaggagtacctggtatgtaataggacttatcagctaaacgttttcctaacacagaattttggtccactttcgaccagaccgacaacatcagtctcatgcccatccggtgaagactgtcggtcatttcccgaggtgcaggataatctgtctcgtcaaaacgcatggcattccatccatattttccccagtactgccagtcctgtaccatcaagtcaaccggcaatttttttcttcgaaattcggaagccgtttccagaatttctttttgagaatgaaaacgttcccggcaatgaatgtatcccaaagcccacgctggcaacatagggacttctcctgtcgcttcccgataagaagcaatcacttcatcggctgttcctgcaaagaaagtataatctattccattcgataccggagagcgaaaagtagtagtttcatctacttttctaaaatacactttaggtgcatcctctttagtcaattcagcccttaaattatgctctcccgcttttaaatctaccaatatggaaactgtaggtggcaaccagagattattcatgtcgactaccgtatgcccatcaattgccagattatgtctacgcgccattaaacttcccacatccagcatcaaagcatactgtccgtctaattctactttcaacttacccacaaatacattactttcacgcacttcctccttccccccttcagtagaagtcacattcacggttactttatttcctcccaaccccgttttctgaagtgcaactaccgaagaagcaggattaaaatctgtcaaaccataattattccacaaaagtccgtatcctttattcgacatcacaaaaggaatggctatctgtgtattaacctgggtcagtcttctggttaaaccacgcacattcaaataaccatcctgaaactgtcctaacccgtaaagacactcatcaaacggagaatgaaaagtctgcgtagaaacatacgttttttctccttgcactgaagaagactctatcagactcgcctcctctcctacaatttccttgccaccagaagaaaggaacgaaatccgtccgtcagatacagaaaacctgacattcaaattctttaaagacaaaatataactatccttctcctttttcagtacataatcaggaaccttctttggaagatatactaattctggaacttcatgagctatgcccatgcttcgaatcactcttacagcgttgttggtcagcggacgaagtttcaacagagtgtctgctaatcgaaaagttacctgctcagtctcctgcttttccaacgtccattcctgcaactcattagtagacgagaggccgggatcattcccggccaaacattctcctctccaccctacacaagtgaaaacggataataaaaataaattaaccctgttcatagcatacgcaatatcatcagtaattcagcttccaataatcaaaataagccaaatctttcggagcctttcccttaaaaataaaatacaagtcgtgtacacctgttacctgtggaatctgttcttccattatccgccaacgatcacttcccccagttcgtggtactttaatcttagctaacacctgtccgtccagcccgtcaagacgtacttccatagtaatttccgcattgtgagtggtagacaaacgagcagaaaaacgagaaggagctttctcaccgaaatcaacagcccgtactttcgtataagctccatctgctaaggctgtaataaagactcctacctgaggattataagcgctcttcatcttttctgaccatgccattgtttccgcttccaccttctggtacggacaaagaggttttaaactcttcgtaacaccctctttcaccatcttcatgcaaggaatttttccatcagactggaaatcaagttccctaacacacacagaacgagtaaagccacttccaccaggaagagaagcatcgtgataaaacaaataagtttttcctctgaaatcggcaattccaggatgattggtgaaacttcctccttctgtagccatcaaagtacctccatacttccacgggccttctggactttcagctgtagcatacgctaaatgttcaggaaccggtcctccagcataaaagaggtaatacattcccttacgtttatacaaccacggagcctcttcatacaaagtaggacgttgtggatctccctccctgcgtccaaaagcttccggcttcatcggtaccgcatgtatctcccctttataagatatcatatccttattcagcttcacataatagcagttcggatttccccaataaagataagcctgtccatcttcatcaatgaagactgtaggatctatattgccataatcagctcgtaccaaaggagctcctatcggatcataaaaaggcccgtaaggactatcagccacagctactccaatagccgtttcacctttacggtccgtcacaggtacatacatataaaatttaccgtcacgttcaatacactgggcagcccatgcatctccacctgcccattcaaatgtcttgaatgacaaaagagtgggatgttcggtccagttcaccatatcatccgtggaataaagtttccagtcgttcatggtaaaccacgtagaaccgtcttcatcgtgacttgtataaaggtacagcttgtcattgtataccataggagccggatcagccgtataagatgtttggataatggggttttgtgcatttactgccaaaccagacaacaaaaccactccctgcataattctgcaccatcgaatatttagtaaagacaactttatatcttttcttaaaatcttttttatcatatatactctatttatgctgtaaactaatatcagaatttccaataatccaattcaaataaatccttattattctctccttcaaaactaaggtacaaatcatgtatgccactgaccgcattgacctcacaagaataaagttcatacttagatgtttcatttccctgcggtatattcacgtttcccacaatctttccatccggagcatccaaacgaattttcagatttcctccctcaagaggcaatgcggaaacttcaaaacagcgagctttattctttccaaagttcactccacgtacacagatgtactctccattgttcacatctaccaccgaaagagacttatctgcattcggagcagttttcaatccatatccccaagccatagtttcagcttctaccttacggaacggattaaaagtaccgatctgctccagcttggtatccgcccaataaggtacttcttgaatagttccatcttcattatagtgcatttctgccactgacaccgaacggcgttcataatgagtattcgtttccagttttaacaaatcataattcaatccaaagacatacgatttccccttataatccataataccaggatgattgcctctggttctctccgtagggcgcataatgtatcctttcgttttccatggtcctgtaggactatcactcattgcataccctattccctccggacaacaggtagaagcaaaagccaaataataatgtccattacgtttatagaaccacggaccttcctgataatgctccggagtttcttttagctttacaatatctccagaatatgaaatcatgtcttcatttaatttcacataataacaattgggatttccccaatacatataagcttgcccatcctcatcgatgaacacggtaggatcaatatcatcccaatgttctttctgccatacaagaggctttcctagaggatccttaaatggtccataaggactgtcggaaacaagcacaccgattccatttccatgaatcggacaatacatataaaacttaccattgcgctcaactacctgttcagcccaagctccattatcacgcttcacccaatcaaagctcttgagagaagcaacaaccccatgatcagtccagttaaccatatcggtagaagtatacaacaaccaatcctgcattttaaacccttcggcatcatcttcatcatgcgtcgtataaagaaataccgtatcattgtataccatcggtgccggatcggcagtatatttcgtttgaataataggtcgttgagcatttacattcagacaattcaacagtccacaaccactacacagtaacaaaatcttgctaatattcataatattcaatatttaagtttatcaaatcgatttttccctatgtatcattaaaaactaattactctaccaatttccaccaatcaaaattgaaaagcttgcagccttttctacccttaaaacagaaatataaatcatgtgtacctgaaacagcctgttcaccctgtttcaccgctgtttctaaagtcttccaggcttcccatcctccggtatgaggtacttgtatttctgtaatcaacgtgccaccaatactgtcggcatacacttcaattattccgcctctcaatgcactggccacacttacttctaacttgctggcaccctttttgcctaaatcgacttctctgacctttatataatcaccattatgaatgtctgatacataaattcctgtccgatcattcggctccgtcttcacaccttcagaaaaagccatagtctccgcttctactcgctgataaggatttagagaacctaccggttttactccttcttgcgtagcattaataacagggaatgttccgtctgcattgtattcaaactgttctacagccacagaacgtccgaatccaccaccttcaggtaattttccggtatgataaaagaaataagagttccctttataatcaatcaccccacaatgattcgtaaatgaatccgtatcctgcaaaggcataatttctcccatatatttccagggaccaacgggcgatttactcatggaatacgcaatatgttccggaacaccccctgccgcatacagcaaataataattatcctttcgcttataaaaccaaggaccttccgtatagatatccttgtatttttctcccttcacacgcttatccggatttggagctccgaaactgttcactgtttgttccagcttcttcacctcacccttgatggatatcatatcctcattcaattctgcataataaatattcggatttccccaatacaagaaagcccttccatcatcatcaatatacacagttgggtcaatataatcccaactgccgtcacatagcggtttcccgatggcatcccggaagggtcccacaggagaatcacctaccgccactccgatagccatcgctcctgtaagttttgaatgcagacagacataccaataaaatttaccctgacgctctacgcactgtgcagcccatgcacggtcatctgcccattcaaaagattctatggccaacggagagccatggtctgtccaattcaccatatcgtccgtagaatacactctccattcctgcatccagaaaaaatcagctttgtcctcatcatgtcctgtatacacataaagtctgccatcgtgcaccataggagcaggatctgtcgtataacaggtctgtacaatcggattctgtgccatcagtatgggagaaattaatcctcccaatactgaaaataatatcttattccttatcatcattccaatattaacaatttacttccgggtaatcactacacctccatttttaggaatagaaagattcaaagtctgtttcttgttgataacctgttccttgactgagcctgccagtttatcattatcttcatacaaattgacgatttctcctgctgcaaacaaagttgaaacatctatctttaatttaatagtttcatcctgtgcattaattcctgccacgtaccatttaccagcatgtttacgtgccatcacaatatattttccaggataaccgtctataaacttcacctcatcccaagtagtaggcacttttttcatgaaatccacggcccaagctggagcgtcagtcaggttattaggtgccaatgcaaaatgctgcaccggactctgaaacaatactgccgtagccaatgcaaatacatcggacgtaactctcagccgtccccccggttcatttttcgcattataatatttgttcaaagtacttcctccgaaatccatactcccaatcgtattacgaacaaacggatggatacatgcattgaatgcttctgcatcgcagcttccctgagagaaattcatgttttcactggccaataccgcttcactggccgcataattaggatacatacgttcccatccacgcggaatggtacatccatgaaaaataaccaacagtccataatcgtttgcgtcagctaaaatgtcttcataaagctgcatggtgacctgcttgtcactacctatgaaatcgaccttaatacctttgatacctatacgttgcatccatttcatttctttccgacgctcaatgatattactcatttttccacgaggtccttgaggggcatcattccagtatccattggagttataccacaaatatagccctacattcttctgtttggcgtaggcagccagctcttctatcttatcataacctacctgtgtatcccaaagcgcatctaccagcaccgtacgatatcccatagctgcacaaaaatctacataacgcttttggtcatccatattcatactggcatctccggcaataatccagctccaagttccacaaccgtattctgcggtatagtctttcgacggttcatataacggctctaccacatcaaacggtacagttgtttctacaataggagccagtgtagaacccaaggttatagtacgccaaggagtcttacccggcaatgcaattcccggagaaatcgtgccattgccgttaaattcaccttcctgcggaaaaccaatggtatacaacccatcttcatgccccatcaaacgactaccgcaataataactgtttactccagtttcagaaattaaaatccaacctttatctgaatttttaaacaagcaagggaatgtatatccttctccccaaccattttttcccatcgtatcatctactgtatatggagtttcatagctgggagaagttctggcgaaaccacccatcggtccgctttgtggacataagaaagtagtcgtaccttccggcatgacaaaccccgtagtttcctgctgtatcacacagcacaaaatatccttcttaggataaacggtatatctaaaggccacgtcattattacttacccgaaattccacatcaaaagcagttctcccttcttttgtaaatggaacgactactgattcagccgcatactccaccttacttttttttatgttcggtaaacggtagttcttccggatagaggtctccttgatttcactaccgagtgataaagaagatgtaaaatcaccaatagtagtcttcatacccaacggagatttctcaataaaagttactccatcatagaatacctgataagaaggaattccaccttcatctgacactactaccttcaaacgtccatcaggactcagcacctctttttcacttgcatataaacttgtcatacaaatcatcgcagtaaacgatgacaataatacacgtttaatcatagacattagttttattgtttatgtttcccttttagtgcagataaaacgactaaaagggaaacgtaatattacacatcattctgtaagcaggcgcaacataaagattccaccagccacactattttctcacttttcttttatcagagtctcggctgcaaaacctgttctattatttctttatatgctgatattcaaagaaatcgacatcaacaaaaccacccagactctttgtcgcataattaaacaaagcaaacttagtgcccataaagaaacgacgataatcaaaaatcatcttaaaatcagttccgattttcttccagtctttattatcgtaactataatagaatgaagctatatccttattcaatctgaagtccccatccaaacgaaggtatatcacatccgatgtcaattctaccttttgaatttcatttcgatcaatacctgtcacagacttatttttttcatccaatttgacactttctgttttcatagtcaaatacttctggcttccttgacaagtgacagctaaaattccagcatctccattaaatgcactcagtccagccacatcaccatccttcatgcccgaaaggtccatacaaaccactccagaacatttcggcccttccatacgctgagttaaagtattaggagccacaaacaaattatccacaactcgtccggtcgtcaaccgtaaatatcccttacgtgcattcaatgaccaacattcattcatcggattatgattccactgccagtttaattttagcttttcgccactaaaatcatcactcactaccaatccttcagaagaatatccttgtacaggcttagacattgtagccggcacatgtccattttcatctcctaacatcggccagccgtctacccatcgacaaggcatcatagtcaacacacgacctaccccattacgatcctgaaaaataactccataccaatttccttttccatcatctacaatcgtaccttgtgccacgtacggaaaaccagcaaatgcatcttccaatatcacctttttctcataaggaccggtaattttatctgcccggtaacatacttgtctgcgtttacctcctcgaggccatgaaatcatcagcaaataatacttcccatcgtgttttatcaccctactaccttccagtaaagcattttcctctttatctctttcgaatatcttcatatccacacctcccggcatgacatcactcaaatccggcttcagttcacgcaactgtccggtaccataaaagatataagctttcccatcgtcatcaaaaaacaaagatgcatcatgaaaatgaggaatacgtgacgacaatgtccatccctttttagggtcagaagtagtatacacatatcctttgtaaggggtgtcattcggagaaaaataagcataatatgttccattatggtaacgcaaagaagtagcccactggccacgtccatatacagttccttctttcaagtcataattcggtttatcatccaaccgatcatacagataacttacgatttcccagttgaccaaatcttttgagtgcatgatcggcgctcccggaaccaaatgcatggttgtactcaccatataaaagtcatcccctacacgtatcacatccggatcaggaacatctgcccaaaatacaggattagagaaagttccatctccattgtcaccacactgggcattgactacgtcagggtacacgcctcccatagccattaacagacaagctagcaaaaagtgttttttcatgattttattctattacaaatgattcattctgttaattctttactttgcatacacgacataccgctttcccggttctgttttcaagtcatattcatagattctctttagttcaggcttttccggattcgagagtttcttcgatattaaaggtgaagcaacttcagcctgacaaagtaattcattcggacaatcccctgaagcacgcttcaaacctttgcctttcaaaggaatatacgaccgtaaacgtatagttccacctatccgcgaataaattacagccttggtaagatgcacatttttccaatccatatctacgacaaaacctcctcgtgccaccaagccttttacatttccatcctgccattcatcaggtacggctggaagtaaatgcactgcaccatcatgactctgcaaaagcatttctgccactcctgctgtaaggccaaaatttccatctatctgaaaaggtggatgtgcatcaaacatattgggatacgtacgccctaaaggatacttacctgccagactgtcgcaaggtaacaatgaaagcatattccgaatgatattatacgcatgatttccatccagcatacgtgcccagaaattaattttccaaccaatactccagcccgtagccatatcacctctttgcagcaatgtatttttagcagcctgaaataattctggatgccggtaaggagaaatctgattacttggatacagtccatacaaatgagatatatgacgatgctggtctttcgggtcatccacatcttccagccattcctgaagctgattatattgtcctatttgcataggaggcaactgacttatcagagactgaagagaatcacaatatgccttgctatcccctataatccgtgcagcaagaagagtattgctcaatacatcaaaagctatttggttatccatcgtgcaaccggctacaattgaaactccgttcggtccatgttccggagagacagaaggtgcagtcactctccaaccataccgaggatgcttagtcataaatgacaagaggaaatcagccgtacctttcaacacaggataatattcacgaagaaaattcttatcacccgaatataaataatgctgccaaagatgttgagctacccaggctcctccattaggccacatacccgcatcggcaaaatccaccggtccggcagcccgccagatatccgtgttatgatgtgccacccatcctttagctccatataacacacgagctgtttctttacctgttacggaaagttcatgcgccatttgaaaaaatggcacatgagtttccgacaagttagtcacctctgccggccagtaattcatctccgcattgatattaattgtgtacttactatcccagggtgcatataaatccttattccatattccctgaagattagccggctgactgcctggctgcgaggacgaaatcaacaaatagcgcccatactgaaacatcaacgcagccagtgaacaatcttttaccttattgaattcgttaatacgtacattcgtttccttctttgaaaattccgaagatggcaaatgtaaagccactcttccaaattgcgcagaataaatcgccttatgctcatcgtacaactttttattctgtttatcccacgccccttcaatggcacagcgcgctttagcgtatgcatctcccgacacatcctgataattcacaaaattagttgccgcactgagaaaaacggtagccgaagatgcacctctgacagacaagcatccatctttacattctatttttccatccgatttcacacgcatcataaccaccgcatgaagtgcagctggaataccttcatgctctgctccgttacacttcattataagatagcctccttcgctctttacctctgaagtcagcggacaagcatatctcaaatccacatccaatttcttattacctttatctgtcgccatttctacaaccatgacgttatcagaaaaagacgtaaatacccgacgggtatattccacaccatcacaccgaaaacgtactgaagccgtagcatcttctaaattcaaatcacgataataagaatcaatctttccctcacaattgaaatccatcaaaagactccccaatgtcaaataacgcattccatgatgcgatgtcataaatttttcatccaacagcgttctggcttccaaatttttattctcaaatataagccgtcttacctcatccagatagcctgaagcaccagctctgttattgctatatggaccgccggcccagaatgtttcttcattcagttggatttcttcgtgatttattccaccaaacaccattcctcccaaatgtgaattacctacgggcaatgcttcccaccaattacgtgccggagcagaataccacaacttcaaatcccctgcactattggcaaacacaccaagaatcgaagtcgccagaaacacacatacgtacagaaatttcttcatagatgcctattcttacagtgattatttactgaatgttcctgaaacaaaaggcagacacaaatataaagcagaatgccaatattcccaatcgtgtccaccgtctcttaccctaaactgacacggtattcccgctttgcgcatggcctgaaagaactcgatatttcggtcaagcaagaaatcgtcatctccacaatccacaaaccatctcactgatttcagtgcctgaatcgtacctgcatctgcattcgtcacacgcttgatacagctcctttctatcacagctcgtgtcaaaatagccagcttgctgtccggattatcaaaacgggctgctccttcttccgaaattgacatcagcgcactcatcgcatacaccgaagcaaacttatctgcatgccacaacccatagccggtagctcctccgcctcccatggataatccggctactgcacgattctctttatccccaataacgtgatatttattttctacataaggcaagaattcttcaaaaaagaaatcttcataaagccagccaggcatattaaagaaaccattccatatttccttgtaaatatcaccaccagcatcaggcatcacaataatcatctcacgggcttcctgtgaatatatcaaacggtcggccacctcctgcacatgtccgcgccatacccagtcttgattagtttgcgacattccatgaaaaagataaagcactggatatttttttcccggaacttctccataagatggaggaagatacaccgagcatgttctttctgcatttaactttttactaaagattgtatcatttacgactctgctacgcgaaaataacgatacgggtataaagcataaaacccataaagcaataaaaaaagaatgtttatccatagacttaaaatttaatccatacaaaaatacgcaccaagcatacaaattacaataaattacgttaccaggactttcgttcacgttacacataagcgatattgcatttacaaaacgtacattttacatatactcatattacattcccattcatatcaaactaataaacaagtcattacataagcacgtatcctatcggaaagaaaacagtatctcgtaacatagaataaaagatatgcaacatgccgtcacacataccccacacaaaacaagtaaatttgccaatgaaagattacataaatacttcatttaaccaacacaatcattcaattatttacaactaattatttaatcatgaaaaatcaatttaaattactcacattgggaacactaagcctcatcgctgcctcgtgtggaaacaaggtaacgatgcccgatccgggtactccagtgttcacacaatttacctacacggggaaagatgtagtatatgaaaagaatccactggcagaaggagaattttataatcctatactacagggatgttaccctgaccccagcatttgcaagaaaggaaccgactattacctggtatgctcctcttttgccatcaaccccggagtacccattttccattctacggatttagtaaactggaaacagataggacatgtgctcgaccgcccttcacagttaaaggtagaagattccggaatcagtgctggtatttatgctccgactatccgatataattcctacaatgataccttctatatgattacaactcagttctcaggagggatgggaaatatgattgtgaaaaccaaagacccgatgaaaggctggagcgatcctatcaaattgaattttgaaggcattgaccccgacatcttctttgatgacaacggcaaggcatacgtcactcacaacgatgcacccgaaaaaccattatacgaaggacacagagttattaaagtttgggaatacgacctggaaaaagaccagattattccgggtacagacaaagttgtagtgaacggaggagtagatttgtctaaaaagcctatctggatagaggcgccacatctttacaaaaaagatggaaaatactacctgatgtgtgcagaaggtggtaccggaggctggcacagtgaagtaatctttatcagtgacaatcctcaaggtcctttcaaacctgctcctgagaatccgattctgtcacagagacatctgccggctgaacgtccgtttaaagtagactgggctggtcatgctgatttggtagaaggtcctgatggacaatactatggcgtattccttgctattcgccctaatgaagccaacagagtaaataccggacgtgaaacctttatattacccgtagactggagtggcactttccctgtattcaaaggcggtctggagcctatccagcctaaactggctatgccacaaggtgtgaagaatgaaactggaaagaacggatatttccctaacggaaactttacatttacggaaactttcaccggaagttcacttgattaccgctgggtaggagtaagaggtgccagagaaggattcatttctactactgcggaaggtctaacaattacaccttacgaaaccaatatcaaggcagttcttcctacttctacattgttctatcgtcagcagcaccttaatttcacggctacaactactctgaagtatgtgcctcgtacagaaaaagacctcgctggaattacttgctatcaaagcgaaaaattcaactatgtatttggggtaacgaaaaaagcagaagatagctatatcgtactgcaacgtactgaaaagggagaatcttcaaccattgccagcgaaaaaattgaaggaaacactccaatcagtctgcgcgtaacagcagaaggagataaatacacattcagctactctgtaaaagataataactaccagaccgtaggaggaaccgtttccggagatattctttctaccaacgtagctggcggatttaccggtgcaatgattggtttgtatgctactacttccaacgatgcggaagctttataatcaaaattagtaaccacaaagagtataagaaatatcttctatactcaaagaaaagaggctgcttaaaagggcagcctctttttattctcatcatttaacatatatgacaaaccttcgatacccagtaagactaggaacaccatcatcatttaattctaaaattaaatgaaaatttttacctgtagcatcttcaggaatgtgtaacacacacattccctgcttgtcagactcaatttctaccacacctttatacgtaccaggctcctcatacacataccaattataatgtaaattatttccatcggggtcatacgatgaagaagcatccaactgcaatacttcccctgcctcaactgttttactaaaaaaattaaatgttgaatcattctcaaagacaacgaccggatgatggttagcatccgaaaatttatctgtagtagcccaacacattctcgcagcaaaatcattcaaaatatgctgtcgccatttattaatggcagcaataccctcggacgtactagcatgcataaaatagggatcataaattttctcactcttacctgatttttcaataaaatccattcctcgtatacctgcagtacgttccattttaaatcggcctccccatccaccgtacgcaaggctatccggaacattcaatccattcacatatacatataaaaaagaaggagaatcaccttccgaggcccatatcctgtctggataacaacctcctaacggttttcttgactgaacattatctttaatccattcatcaccaggtccccatccataaatttccgtatttcttatataaaagatttccggaaaagatttagcaatccaagctccagcatcatcttgccctaacacatcataaattcgaattttagctacaaatttttggaattcttctggacttctggtagaatggaccttccaaatagcttgtgctatcgtattcattccactccatgcagcaagccagataggacgagcgtcttcttccttatctaccgccgcaataattaattcagaacccggagagtccttaccttccccaactcctgacatattcgatttttcctgtcccctttttacaatactcttcaaataatcaggtgatggaaaatcgtttgcatgtttctttaaaaaaggataagcatctgcataacaatctatgacttctgttatatctgaagttctatccgggtcatctacccaagcatttgagctgatgattccctctatatccattctatctgcacataccaaaaggtgtatcaatgattgcttgtcatccggatcagctccacctaaatctgtagttacaatcaatctttgttttcctaaatcatttcgtgcaaacagaaatccacaaaaacccaaaaacaaagtcaaaacaatatatctcatatcaaaaccgttttattatcaatagtcatcaaactaattgctctcataaataaaatatctactttacctcgttcttctacatggagactcattcatgtataaatacgactttttatatcccccataatcaaccacaatcttttctaaaaccacagcaggatctaaaggcgaaaaatcaattatataactaccatcctgacttacaggcaaatcaagactcacttgtttttcaactacacgtcttgctaccgtaggataaaatgtagtatagatattctcaggatgttcattcaaatcatgattataattcaccgtcactttattaccatttctaaaacctatagcatatctatgaccgtctgtgttatgaaaagcaagcgtggattttacaaccacaatgacattcacagtcttacacttctttatctcctctggtaaaaccatcttataagaaaccgtagcaccctccaccggctttgtataaggcattaatgtgattcctcccaatgttcttcccatatcgggaatcacttgccatttgaggctctcaggagacttggtttcaaagaaatgcccagcttccatagccacatatccgccacttccttcaaagatgtatccccctacattttcctctgataatctaaatacttccggttgtttgtcaactgaaaagtcatcattccatgaagtataacctatatgcttttgaatcatcatccccttccattttccattgctcataacgttattatagtcttcactcaatgctttatcacgagcaaagcaagcttctaccttgtcagcccaatcattagcttccggatttccttcttcataaagtttatggttcatggcctgagcataatacatctcataaagattagacattgcctgaacaggaaataacagcaattgcttataagcatccttatattcaggagcaagtgataaatattgacgtaatgcttcagcttctaaacgtacataatcatctgctacttgcttccattcccctgtttcaagattataagtgtcacaatccagcatttccgccgttacacgaccattatacttggtatacaaattaagaatccgagctgcttcctcagcctgccctttaccaaatatttgttcacagaagcaataaggatgttgcataaaattatcaacagaataatcattcggattccatgccatatctaaaaataaagtaataggatactccatcggtttaagatcccccacattaagtatccaaagtttgtccactccgtattcataagtaagatgaagctgctcccacattccttgtattggagtcatattcatccattttgaatttcggggcgctcccacatagtctacatgataatacattccccatcctcccggatgcttacgctccttatcgttaggaagacgacgcacattgccccaattatcatcacaaagcaacattattacatcttcaggaacccgcattcccttatcataataatcaagtacctctttatataaagcccatacctgaggagtttcctttgccggctttccagtcacatcctcaataattcgacgttggttttcaactatagactccatcagttttacattggtatcttcactcatagcctcgtctccgtctccacgcatgccaatagtaattatatcttcagtattttttaccctctcaataccttctcgaaaaaactgatctaacacttttttattcgtcgaataattccatgcaccatattcattacgtttacgggcccattcttgatggtttcgcgccataggttcatgatgtgatgtgccaataatcacccccatttcatccgcagtcttactattgagagaatcatccgcataaaaagcccacccccacatagcaggccataaaaagtttcccttaaggcgaagaatcaattcacaaacctgggcataaaaacgatgatcaccaaaatctgttccataatattgctttacccagcttgtcagacaaggagcttcatcattcaaaaatataccacgatattttacggcaggctctccatctgtataaatacctggtaatatataagcttctgccctctttactactggcacatccatccaccaataccaaggtgacactccaagctgttttgacagctcataaataccgtaaatagtacctctacggtcactaccagcaattactaatgcttttttaactccattaaaaggagcgtcaacggttgttataatatatttctcattttttccttgcaattgtttcttttcgagcttctccttctggataagttgcttaatatactttgaattcagacttcctacgataatgcaattctcatccgaaatttcagttgtcaactgaggctccatcccaaacacctgactaaaatcctcacataaattatctacagcaatgtgaatacctctttgatcttctttatctataaggatatttattattttgttatcagatactaaagaaaacgcattactttctttttcaaaaaccacaaaccgatttgctgaaaatgtatccaaacatactataagcaaaaagcaaattagactatgtattttcatggtataaatttaaaatcatttatttcaaaaaacgacaacaaagactcgtaatcaattccacatccaatattatgaaaatttctcttatccccatcttttacaaataacaaaaacaggaataagagaaactttcatgtataattttattcttgtgaaattatcactctgaattttgtctattaaacacttctaattttggtattacaaatgcttaattatttttcctgactcaattcttcagatggctctgctataactttaccagcaagtccattagcaaatccagcatacgtcggtttacgtttaaagctgctatcccataaaccagtaggttctcctggtctccaaccagaatcagccggactatctgtagcacaccactgagtaataccatattgctgctctacaggaattatctcaaaatatttactgataataaactgatagaactctgccattttcagttgttgctcataagttacattctcagtcttgatagcagtaccgaaagctttgtctacaatacccatatccaattctgagattttgataagcttaccactttcagctaatatcttaaacatattaacgattgcatcctcttgagctttttgatctgcttcattcaaaatatagcttacgtgcatttgggttccaataccatcaatctttgttacaccatctgattcccatcttctaatccattcaaccaagctctttactttttgattaccatcccaccaagactctagattaaaatcattgataaacaacttcaacttagacggatcgcctccatattccttgaaatatttacgtgctcttgattcaagaatacgtacataatcaatatcgcctaaataatcagtccaatagaaattagttgtaggatctccattctcagatgactgcaaatcatagaaaccatcgccgtcattatctactccagaaactgtttcatttgccaaatcccaagctgtaacatagccacctgttgcttccatcatacctttaacccagttatccaaagcccaagtaagcgtatctttcttttcttcaggagtcaaaggaattgtatttcctttttcctccaattcccatttaatatcatcaaaataataagtattagcttctggcaatacagacaaattaaatgcaatagtattcataccactcgcacctgcttgatcctcagaaatagttccttcatacacaaattcctgccaagtggtagagaaagtaggattagtaaacatattatagaaaacatatccaccaggttcattatgcgactgagtttcacatccagcttctttatctgcgcgatatttcatgctaaaacgatatttttcgccagccatcatcattctcggagtctttacaaagaattgagtatcccaagtatttgtcggattatctcctgatttaacaacaatagcacgtccagctccatcagcacctgttcccgcagcaccaaaagtagcagctttaggaccagatgtcatttccgttgcataaaagcaagaagtatcatcactttcacagtcactatttaaaagcatattattccaaagtgaaattgacggtgcttctttatgcgttactttaagccattcaatttctatatctccagcaaagtttccagattgaaacatcacaaaaccatcagctgtattcactcctgtaaatgtaagtttaacttcctgccattcagttgtaaatgataaagcagcagtttgttgtcctccccaatctccaatacaacatgtcaaatatccatcgccactagcctttatcttagcagtaaccgtatattctatatccggactagcaactaaaccattcgccacatgatattgaatttcgtaaaaattctcaatagcttccggattatgaattaacaaattaccatcagaattaatactagcatctactttatcaccatgccaataagtataagatcctagtgtagaataatctacatacacatcatttacctcttcggcatctcctggatcaactgtgatttctttatcagcaatcaacccattcaaataagtcatattctgctgtgcatgccaacctaatgtatgaccgtaaatcgtaatacctgcagctttggctacatctacaaaatttgaaaccgttgaaaagttcatcgtaccatcatcggctacaactgaggcatatttcattgcattgcctgcagtcatctcgtcaaagtttgtagtaaccgcttcataaactacaccttgctgaacaaaatcacttacactggccgctaatcccaacttgaagttgggatttttagcacggtccagatatgatttcaacacgtcataattattcaaatattcatattgagcaacgcttgtcggcttttgaaccgaatagggcaatagggcatcgtcaacacatgattctactaccatccctaaggctaataccggaagcaatttcatatattgtttcatgtcttctttaatttaaggttatttattatatgtaacatcaaaccattcagccttaacctgacgatcgcgcataaccaatgtatccttagttgcatagacagtagaacctaaatccactgtataatccaaatacaagacgtcacgatctttgttattaaaggaattcttttctcccttctctacatacttaccagaacctgaaacagtgcagcccggagtgtctgtagaaagtgtacattcattattatcattaaaagaaagaatcaaattgcaattttgatcattaagagtcaaagcaaaattagcatccttcaatgagcgagttgtcaattcgcaaacttcatcactttcaacagaacctgtatgacgaactactgtattagtagcaccaccttgagtaatttgatctaccccacgacgcaaataaactgcatcccacggattaatatacttcacggcatacaaaatgtaatctttcggcaatacattccagtctgacttgttgcaacgaacaggattttccactaaaggagagcctgacaagatagaatccgcattatgtacatttgacattaccaaaggaattacataggtagtttctattgctttaggatcagcaaagaaagcatcagtcaactgtacttctactcccgcactaatctgaccttgaggtatagtgatttggtcagaagaaagtgtataatattcagcaggcataggaaccacgtcttctcctgtagagaacttcaagttgtcacacaaagaatttaccacttcaatatcaaccacaggcgatgtttgattttcatatacaccacccattgttgccttaatcatacatttatgttgattatcaagtgtattatcaaaaacttcatcattacccaaaacgatagtacgcaccggatactgataagcaaaatatacagtagttgttccatagtcagggaaagaccaatccccattctcacacgaagagaaagaaaccaacgctaacagtgaaaacaaataaaatagttttttcattttttcagtcattaaaaattattccacataaaatcaatcccaacccttattctgttccaatgcatcaaatttcactacttcgctataaggaataggaccaaaccgcatgaaatcattatatgtacggctttcaacattaaatacctgataggttcctccactaatacgtattccttttgccggttcgttcaaatccatgttccaacggcgcaaatcccaaaaacggaaaccttcaaaacacaattccaaacgacgttcatttcgtattaaatcacgcattttagcttgatcattcttcacactttccaaataaggatcatttcctgaagcatctttaattccagcacgctgacgaatggctttaataacatcataagcagaataaccatgtaaaccagtacctgtaggtccccatgcctcattggctgcttccgcataattcaaataaatttcagtatagcggatacgcggactataatgtggctgtcctgtagtggttgtagagctcaaatatacatcttcacgtaaatgtttacgcagataataacctgtacgggtagaatagccattttctttattcaaaccatcattgttagaagtattatctacacttgtatcaatggtcttgccatcagtacccataacggtaccattcaccacaatatagagagccagacgtggatcacggttggcataaggattttggtcatcataaccagcttcaggagagtcaattggataaccattagccatcgggaaagcatcaactaaattctgagtcggattaatctgaccgctaccgtaaaggctgggtgggaactgcgcctgctctaatgaataagctgtagcatccttaccatttctccaaagcatctcctgaggattagaacctccagtcaagctattaatttcatccgcattcttataccacgtatttccctgagctgccaaacctgctactccaccaatcaaatccaggatttcaccattatagtcagcagcttctgcccatgttcctttgctaccttctgcaaatgccgggctggcagctaaaagtgcagcttttgcacgaaaagccaacgcgatacgtccactcatacgagaacggaaattgttaccaaacacaatgttgtactggctgaagttagctccttcagaacgatatacttccggaacttctgcatcggaagagatattctcataatcaagcggtaacaattcttcagcccgttgaacatcatcataaatagcctgaatacattcatcaaatgtgtttcgcggatagttgaaattagaagtttcatcttctacttcctccacaataggtactcccatcaaacgaccatcctctgtgtatccagcatgagcctgcaacatataaaaattaaacattgcacgcaaaccataagcttcacctttcaaacggtcacaaaacattttattcacaaccggatcttttacccatgaaacctgatcaacctgagtcaagaaaagattaatgtaatgaatagcagccttacaagatccccactgatccattggattgttatttgatgtccatgaaccagtagccatcttcagataactgttacttgtctggttagttacagcatcatctgtagccacatcattaaatgactgtgaattgtagggattacgagtataagcattagccaaaattccttctgcatacaaaggatcttcaaggccatccgaaacttgcttattattttcaattgctggtgtaaataaatcatcgcatcccaccagtaaaaaagccgcgacaaaaactgtcaatatttttttcataagaatctacttttattttatcaatttagaaacctatcttgaaaccaatgttgtagaaacgagtctgaggagctgctcctgtattcagttccagcttttcacgttctttcgatattgtcaacaagttgcttgcataagcatatactgagaaactacgtacaaatgaatttcccaaccattgtttaggcaaatcataagtcaactgaagacgagacagattaaaccggttagtcttatacatccagaaatcagaattacgatagttgtgattatccgtttgtgtagtcaaacgtggataagttgcggtttctgcagtttcaggagtccaacgtccacgtaccacttctgaatacttcttatctccatatacccaataataatcaccactcatgaaagcagaagcaccccaataaccggtacctaaagcaaacaaagtaaagttcttccatttcaatgtaaggttcaaacctactgtcaacggagttccttgccagccatagcgttcgcccaaataaacttcatccttttcatcgataatcttatcaccattctgatctacatatttcaaatcaccaggtttcaattcaccgaaagaggaagtgattcctgaattctgaatttcctcttcattgttgtagaaaccttcagcctgtaatccccacataccatcagtaggtttgcccttacgataacgatatgcatcttcatacagttcatctacctttgtattctcattggtatagtaagtagcatttactcccaagttaaaatcaacttcacccatcttcttattgaaattcaatgctaaatcaaaacctgtacgggtactattgttatagttcacataaggaagcaaagtactttcgggccaataagacacaaaataattcggataactattagaaggttgaaccaacattccttcaaggctattcttaaagaatgatgcatcaaaagtcaacatcttattccataaagaaccgcgtaatcctacgctaatctccttacgcttgatgaaagacagatctgaattattaccgcgtctagcttctgttgcatggctctggttaccatcagcccaaccccaccaagcaccattagcctggtcgtagctactttggtacatatagtaatcatcaattcccaagtctgtatttaataccgaacctgaaacactcagcattaaatcatccaaaaccgatgaatcttccaggaagctttcattgcttaaacgccatcccaaagtaagtgaaggtgagaaagcattacgattattttccggaagacgagcagaatggattaaagctcctccaaaactcatataatatttgctcaaataatcataatcaacctgcaaacctaaattgacattgctggttttatgatatacggcactttcaccttgctgatatccggctgcaatcaacatagcagaaatattgtgactatctgcaaatttgttgttatagttcaactgagccgagaatgccatagtctgacgattccagctatcggcaatatgctgaataccatcgtgtacgtcatcaccatactttgtcaagcccacaatcagatcctgaccgttcacattagcccattgaggttcataagtagcataagtatcaccataatagcgattgtaggttgttgcataatctatcgcaaaacgagtctgaaaggaaagacctttcaaaagcatagaaagatccacatctactcccatgtcaaactgatattgacgacttgtataggtattgacaccagccgcataaagattggcaatttcattagtctgatctacttgtgtaccgcctaacaaatattttccatcaattaagtaacgactattatttaccagattccatgcatccgtattattctgcataatataatcaacaggaatcagcggagaaatacggttaggtctcagtgaagctgcagctccccagaaattaccacgggcactacgtccatcatagaaagtagcattggcattcacataagtcttaacatattgtcccagattcacatcaatgttaccacgtacactaaagcgagttgtacggtcatctttcgcattacctacctttatcaatgaacctgtattataaaggttgatattggtataaaaccgtgccttttcagaaccacctgaaatttcagccgttacatccgactgattgtaagcctttttcagataatcatcagaataaagatttacatccggataacgataagggtttattccagaaccatggttataaatatccacatcactatataacggatccatgccatcatttacacgagcttcattatacaatgtcatgtattcagctgatcctaaatatttcggataacttttcggaacgaaaaaaccggtattacctcttacatcaatacgagtatctccttcctttccacgtttagttgtgatataaataacacctttggcagcacggctaccatacagaaccacagcagaagcacctttcaggaaagtaatgtctttaatttcagaaggcattacgttgtttgcatcacggggcactccatctaccaataccagataagaatccattccccacaaactacttccgttccagccactaaccatgttctccatgccgtctaagctgtatgtgaagtaatcctttttcattaattcttctacatttacagaagaaactcctcctaaaaggtcttttttgttcacctttctataagcaacctgtactaactcctcttcagcaacagataaagaatctgaactggcatccaacaattctgacggcaaattttgagcgccgacatacaatgaagaagttgcaagtgccgcacataaaacagactttattcgtatgtttttcattttaattcctttttaattagcattcaaaattctcaagagcattaccaaccgggattttgatataattccggataaatattcacatcagaaaccttcaaaggcaaccaataatgtttctcagagaaattacgagttacaatcacctcttctctgaaattagaaacgcgactttgagtcggatcttccttatccagttccacgcgatcaaattcctgagaagttttaatagtataaggatactcagttaaaagtaaccaacgacgcaaatcattgaagcgatgtccttcataagctaattctacggcacgttcacgtcgtaactcgctcataaatccgtctaatgagccggcgtatttactagcaacatcatctacacccgcacgttcacgaatcttatttacagcatcgacagcggtcaaagagcaaccgtcagcttttgcagatgggcctccataaccattggctacagcttcggcatacattaaataaatatcagacaaacgcatccaacttacttgaatagtcaaagcatcaccataatcgcgaaagccttcatcaaaaccatttactacaagtggagtaaacttatgcagcaagtatccggtacgactttcattttttacatcacgataattacctccagtataaagattggcatactgaatttgtttatccttttgctctgaagtaaatttagctgtattctgaattacctgcagtccatcataagtaatgtcggcatagaaacgggggtcacgatcacgccaaggatgttctttatcaaaatgagcatccgggtcattcaacggaagaccgtttttcataccataataatttacataattagccgtcggcgagaaaacaacaccatttgtttcatttgccaaagtagaaggaacatattgaggacccaaacaccagcctgatcccatccaccagtcgtacatcggagtctggaaaatagcttcagtagaacctgggttcttgctattctgtttaaatgtatagaatatatcggtataatgttcaaagtcaaccaatgcatattgggtttgtcctttttctaccagattcaacaattctgcaaaagcatcagcagccttcttgcagtaatctgcattataacttctgctattctgagactcatagttcatcaatggactaccagcccacaaatagttctttcctaaataacccaaagccataatcttattgatacgctgctggttatttccatatgtagccttacctgtagtagtatcatcccaatcaataggtaacagatctgctgcacgacggaaatcttcggctgcacggtcggcacattcctgatagctcaaacgtgggttacgcaatggttcagaagaagatggtacagaatcaatataaggtaaaccaccgaaatactgcatcagttcaaaatggaaccatccgcggaagaaataaagctgacctaatatcaagtcacgctgctcttctgtggcttccaccagtttatcaatattttcaaggcctaaattacatttacgaataccataccatgccaatggccataaagatttttgcatacggtcagtagagttagccaccgtattgctacggtccatccagccacattgccagccatcatagcttgactgccagccccagaaatctcccatatcaaccttgtatcccatatgatagtcgatactaaaagagataagttcatcttctccccagttgaatgagttgttccagtagccatgtgcaaaatcaggaatacagtaatacagttcttccgtaaagccctggaaattccggaaatttttaaaagcatcctcagggttcacactactttcaggtgctttgtcaagataatcttcacaagaagtcattcctacacagcacaatgaaagaagtcccccatagaataatgtacgtatattgtttcttttcatttgacttttcattttataatgtgaattttaaaccgaaattaatacgtttcaccgtaggataagcaccctgagaagcccaacctgttcctgcaaaatttgattcacggtcatcaggcatacgagtccatacccaaaggttattaccattaacataaagtttcaaattagaaagtcctaaactcttgatccaaccactagtaaaggtgtaagacaattctatattcttcaaacgaatgtatgaaccatcatagaaataacgagctgcatcataataactgttagtcgtagaaccaaaacgtggcatcggtacatctggatttggattatatttactccaacgagaaccttcatcataggcaatcaactgtttctgaccaaatgtagagaatactacctgacgagttacgttatttacaccatagaactgaacgaagaagctccatcccttataatcaaaacctaatgaagcactgtatgtattctgaggactgctagaatatccataaggaatctggtcgtaagaattaataactccatcaccattatagtcaagaatatagtaagttccaggcaatttctgatcatcatttgactcaaatgctgtacttccgtaaatatcatccatagtctgtgtataaccatggtctacataagtatgagtctgaccaattgactttccggcatccttctggtagtcgggtaacaattcaggatcatcagcttcaataatttcattcacggcatgagtcatattcatattagcccataaatgcaaactatttctcagagtcttgttaatacgaagttccagttcataaccacggtttttaactttacccatgttcacccaaggtgcattcacaatacctccaaaataagaaggcatagcacgatccgaaccgctgataagaatatccgaacgtttatctctaaaaatttcaatattaccagcaaacaatccgtctaagaatgaataatcaataccaaagttaaatttacgaacaacttcccaatgaatatccgtattacctacagtcttctgacgataaaaagtataaggacttgctacattatacaaaccagttgcaatgttgcctcctgtttcccactgatccatataaagccaacgacgagttgtatcccattcatcaccgattacgtcattaccgatttcaccgtaagaagctctcagcttcaacatatcaaggaacttgattttcttcatgaacttttcttcactcagcatccagccaatggcacctgaattaaagaatacaaaacgattatcagcactaaacttatcagaaccattatatgcaccgttatattccaagaaatacttattggcatagttataggtaacacggaaagcccagtcctcacgataattaggaacaatactacctttcgcacgctcctgacggctgaataatcccatagcacctaccgtatgattaccaaatgtattgttataatcaatctgggcagaataatagagatgacgttccgtagcattattatcaatagaaccaccttcagcaatccagttaacttgttcatggaaatcaaagttatgactaccctggcttggattatagctgactgcacccgtttctggattaatgtatttgtacaacgcctgatcagttgagtttacaccacggttttgttcgtaaaatacattgtcccatgaaatagaagctttggcacttaaaccttttacaataaagtccagtttctgttccaatgtaaagtcagttgtcaaacgagtagttgtacgtgtattctgtccggccaaggccaattgagcaactgagttattggcattgtttatcgggtcatatccccatgtaccatctgaatattgaggataaaatacattaggaggtgtactataagcactaccccagatgttatattcataactagtacgaggtccttgttttaccccatgtgaacctgaaaggttcgtctttaacaatgttgtcttggtaagctggaagtcaaggttactacgcatattcacacggttataaccataagtagtctgataaccacgtccattatcatattccttaaacaagtcaccttcgtgctgatagtcaatggctgcataatatttcacaaaacgtgtaccaccactcacactgacattggcattttcagaaaatgcataatccttaaacatccaatctgcccagtcaatattaggatagcgttctgcttctgcctgatttgcaggattacgatatttattcatttgttcctgtgacatcatgtacatccaagaatcaggagttaaacctaattcatattctactgcatcattacgcaattggaatgcatcgtatgaatcaagtttgttaggcaattttgaaggcatctttaatgccatgctaccacctgcattaatagttgccttaccttccttaccacgtttagtagtaatcaagatgacaccgttagcaccctttacaccatagacagcagttgctgacgcatctttcaacactgaaatagattctacagagtttacatcgatacctgacatcggacgttcaattccatcgaccaaaatcaacggagcgctattgttccatgaacttgcaccacgaatgacaatttgcggatcttcctcacccggcatacctgttgaagctgtagtaacaacacctggcaagttaccagtcaacgcagatcccaaatcagaaactccaccggcacgttccaatacttttgaagaagtctgtgtaatagctccaacgacagatgcttttttctgttgtccataacctactactacaacctcatccaaaacttctgtatcttcacgcagcacgactacaatcatcgttcttccgttaacctttacatcttgtggagtcattcccaaataagagactgtcaagactgaatttctattgggaacttcaagggtaaaattaccatcaaaatcggcaactgttcctacattcgtattaccttttaatacgattgctgcaccaatcaaaggttcatcatttgcatcaagcacctttcctttcactacaacaccattctgagccattaaagaaacgctacagaaaaaaagaagtaaaaagaaaatacggcttcgcgtgagaaatagcttctggttagaagaactattctcgagaaacttttgtcttatgtttttcattataccaaataattaaaaataaaaaaattacaaagagttacctaatagtatcctttcgttatcctccgtcttttttattaacaaccatacgcatttcatttaagattacacaattataaatcatttaacacaatgcaaatgtaaatcttaataaataaaaggaattataccacattaccaacacctatattacatgttacatcattatcccgtgtgtaacattttctttattctacgatacatttaggctgtataacataaaattgaaggcaaaatatcccgcattcattgtgttctgatgcattttaacgtccaattcaataaacaaaacattttaattaaaaacacaaaggaattaaaaaatgaaaggaatcagattttcaaaattctgctaatagataaaacaaagccgcttgtctatttacaatatttagcataatattgaaggttttatttttaggattaataatatttccaatgaaatctcatatctatcttttataaattcataataaatttcacttttcaataagacctcatttcttatcatcaccaaacattacaatctactttaataaatgacttacaaattttcatcctataccttttttataaatacatcttagacaagtaggaagtataaccttaaatcagtatatttaaataatatcactctgtttcttaaaacacaaaaagactgttccagtttgaaacagtctttttgtgtcaaggttaagttgaaatcaaactattgaggaaaaataatctgatagcgaccactcaaatgcataaacgcaaacaaacgcaacaacccgtcataatatttatccagatatccgtcttcataaggtacatgttttgcttcccacagctgtttgacaaattcttcgcatttcacatccatacaaaccaacgacaccgccgcagctgtagccacaagacccaatgaatgacgcaactgtttatattcacccgcctgcaagacttccttcaccggacttccatctacattatactggtctttaaaatcataaagtccctgaccatacagaaaattctgtattttatttccatactcctgctgccattctctgtccgcacatgcccaagaataatccagagcaatattcataggcacccgccatgaatcaaaacggaaggcatctcctattatcccatctgaatgtaacaaagaaccgtcatagttattataatcaggatttaagccagtcaccggatgaatactcttatgcaggtactcacgacttctctcggcgcattccctccaaaaacggctccttccatcataagcccatctggcccacacttcataaaaagcaggcaaatgataagaaggatcagtaaatttcgcaccgaagcgggtcggagtaaatgtaatcagctgatgttctatatttataaatggggttaccgcatcttttcctacctttttcatcgaacaatctaaaatattttgtgcttcagctaaataatttatgccagattcatttccccatctgttcgacgcaaaaataagtgaagtcacataatatagttcaccatcagaagcaggtccttcggaattacgagttccgtccgtctgacaactccaggcaaaataaccttcaaacatgcctttctggtgctgcatgtacttcttacaccatcgccacaagcggtcaaatatatccttccggtcaaactgcacggcaatcatcattccataagacataccttctgtacgtacatcatgattcttcaagtcactaatataagccatggaatcaccgacctcaaaatagactttattgaccccatagaatacatcattaaacacttcttccagtttcgcatctatttcggcctgagaataacccatttcggcaaaaaagtttctatacttacgcgtttcgaaagcacccgctgaccatggaacagcatcaaaacctatccagtcaatttccacggaagcccccttctgcagagagacccgtatatcgcagactcccaccggagccttttccacacatgcctttaccacacaccagtctttgcctgcaggaatctttacagtagctatatcttcatcatccgctacaattttcaccaccccacctttatccgatttcacacgcattttcacttcttgcacaggctgagaaccaaaatccacacggttgtactgaacccatgattttattttttccaatcggcacttccaaccttcgaacttattttcatcattgacaaaggaaacagacactccttctttactgattgcactataccgatctatctgtattttcatacgcgcatccgtaatcccgactccgcgtaaagtaggctttactttcacaatcgttccatcagaattaaaagttaaggaatcaatacgaacagaacgccgcttatcagcttcaggagaaaagtcattatgatgataaaaaagataccactgtccattatattccacaattgaatgatgatttgtccaacatccagtgggagactcatccataataatgcctttaaattcaaatgggcctgaaggtgaatttcccattgcgtatgccaatgtctccatcttatccttcacccagggaaaagtaaggtaatactttccgtttctttcaaatacaaacgggccttccttaaatccctcaggaagcccttctatcagaactggagcagaagccaactccttcatattatctttcaaccttgccatacgcagaccattcccagcccaataaatatatgcacttccctgtttatcaatcaacacacacggatcaattccctgtatgccttctatgggcttccagtctggcatgaatgggccataaggagtatccgacactgcaactcccacggaaaagactttcatatttttaggttttgcaggaaaataaaaataatattttccatttttgtacacacagtcaggagcccacatggaataggactccgaatccacccatgggacattgttttgtgaaagaattaccccatgatctgtccagtctaccagattttgagaggaatatacatgataatcctccatacaaaaccagtccttaagacgctcaaccggactttttatatcatgtgacgaatataaataaactttcccgtcaaatacacgggctgtaggatcagctgtaaaagaataactgataataggattttgtgaataggtctttagaataaccaaaaacaatgtcactatacccaaatatagatgcctcataaatatagtattaggttataagtaaaaaataagaaaaagaagccaccccgatacagggcagctcctttctcaaaacatgtcacgattaattagcggaatttccatgcatattcgtattggtagaaagttcagtagaaggtatcggcacacgtaaatgacgcgaataatcaaacacctgcgtacctgtcagattagtctgttccacctgaagcgcatttttatttttcaagttattcagcacaatactctgatccggatcattcggattattgtaccatctcatcaagttaaagaatctccagccttcccaatataactctacagaatattcatgtttcagaattcggcgtacagaatttaactccattccttcgcaaataacatctccattacttcctacaactcgaccaaccacaggtttctgctgaagcaactcatccacagtgggcaatgtattgcctttcaaataatcattacctaaatcggcttcagttgtattgaaagcttccgtattcttattcgcacgatcacgcaccatttggatgtattttttagctgttgcttcatcattatcagcttccaaacagcattctgcatacatcaacaaaatatcagaataacggataagacgatcattaataccactctgttctttgcttctcacttggtcaagactatacttacgacatccgaaccattttcctctccattcatcaaatgtatctccagagaacagcacttcataaggaatccagttaccagatttacccaagaaattacagccgccaggtatatacatacccaaataagcacgaggatctataatctttcctgacgcatcacgttcaaactcattatatagtgctaaagaaggctgtccattccaccatctggcagactctgtagagtttggcgcactcatttccaattcacgaattgtattttgtccggttactacccagtcattcaggtcaccattagcagcagggttaaatccgtctgtttctacactttgacagaactgtacttcgaataaagattcagcattattttcattatcttcagtcgcattatcacggtaattatccattaaagaatattgatgagagtcgataatttgccacaatacatcctttgctaaagcccattcggcatctccagcttttgcagttccatccaaaatcggacgagccatatacgtttttgccaaaaaggcgagtgcagaaccttttgtagcacgaccttcattttcagttccttcgtacgaccagtctgaaagcaagtttgcagcatcctgaaaatcttttaccatacgctggtagattgcacccggttcagcaggtggcaacatgtaatctccttcaccggtagtcacataatcacggtcaggaatttcatctccccagaaataaaccagatagaaacgactcaaacctctcaagaatatagcttcacctttcagtctgtcatataattttttatcatcttcattattcaaatcaaatgctccatcctgatttgcctctaatttctcaagtgcaagattagcagcatactgtaacacgtacaaatcctgataacacgttgatacactacccaaatccgcatttacgttgtattgagacaatcttgccgtttctggttcaccggcagcagctccacttgtaaacacatattcatcactacgtgcattcagcataaatggcatccatcgagcccatccgccagctctttgaagaatgttgtatgcaccattaactgcatatgtcaaatgttctttcgtattataatatgtagcttcgttatctgctgaaggattattaaaatccatgtcaggctcacatgaactcattgtcattaataaagagcccaaacaaatacccatatatgttttaatatgtttcataaaattccaatatttcattattacttaaaatgtcaactgcaaaccagcaaagaactcacgatttgcccaatatgtatctccagagtagtaatatgctccatctacaccacgattcaaagtagaaccattattggggacttgcgggtcaaacatagaatatcctgtaatagtgaacggattctttacacccagatacaaacgtaaagattcaatgtgtgcttttgaaatcaatgctttgtcaaaagtatatcccaaggtaatacgattgcaacggaaataagaaccattttcaataaaataatcagatgccatagtatgattaccattcgggtcattaagtacggcacgcggtacattcgtattcacattagcaggcaatgtaattgtttcaccaccagctgttgtaaaggtcacatcttctgcacggaagcggttattcatatcagccatctgattctttgctgcataaccacccatcagctcagttttccagttattataaatttggtttccaaagtcaccttgccacaacattgaaaaatcaaatcctttgtattcggctgtaatattcaggccaaaagaacaattcggtaaagaagaaccgataaatgtcttatcgtcatccgtaatttgtccgtcaccgtttacatctacatatttcaaatctccggcagctgcagaaggctgaagacgttctcccttgctgtttacataattagcagcttcttcatctgtacggaacaagccatctgtcttataaccccagaattgcgctacaggctgtccgactacagtcattgtcacattacctgtactacaagcaccaccagcaagtgaagcattgtcacccaaacttgttacttcattacgataaagagagaagttaggagaaatcgttaattttacatcaccaatctgttcacgataagtagctgaaagttcaataccccagtttttcatactacccacattagaatacatggtattaatattacctgtagatttaggcaactgtacggcaagtaacatatcggtcgttttacgattataataatcgaaaaccaaactgaatttattattaaacatatcaaggtcgaaacctacacccgcatctctggttgtttcccacgacagatcaggatttgcaaagttttcaatcaatggtgctgatgcattagaagagcttccttccggattaatctggccaggaccaaatgtgtaatatctgttgtctgtttcaacaactgactgataatcatatcgtcctaccgcattggcactaccaatccaacctaatgtggcacggattttcaaattattcagccagctggaagttgcgtctttcatccaagactcttcactgattctccatcccacagagaatgaagggaaatatccccaacgattaccttttttaaatttagaagactcatcagcacggaagttagcagtaatcatatacttactattgtaagaatacataactctggccaaataagaaaaatatgcttcgttatattgtgaactagttacgttctggctatctgggtaacgactctctggaccaaagtctgaatattcattactacgtcctgaaacgcctgtagaccatccatcaaacttttcagaaaccataccgacaactcctgacaaattatgtacatcattaaaggtcttatcaaaggtcagcaagttttcaataatttcatgtccgctgcctccttttgtcgtactctgagaattataagcctgctttccgttagctgttccaagatcatattctggaatcaaagttgcatcattgtttcttgcaaatgagtaagtataagtcaaacgatatttcaaccagtcaaaaatctttatttcaccaaatatacttcccaaagcgctaattgaacgattacgaattttttcatttctcaagaaccagatttgattcactaagtcatttccatcacgaccattattaccagtcaagaagaaactaccatcttcattgtataccggaaggttagaaggtgtttggagagtattcatcagcgaagcacctgtaaaaccattggttctactataattagcaaatatacgtccaccataagtaaaacggcctacggtaccttgtacattagcataaatattatccgctttcacatcttccgtatgcatctgatcatcattgtcagcatgagtagctccaatacgatagctggcatatttgctacctccactcactgacaagtcgtatttctgatagttggtattgcagaaatactcatcccaccagtctgtacttccaagcggattgctcggagtagctactcctgttggaactgttttattccatgttccattcgcaattgcagtagcatcagaagaattatagtaaagttcatttacgtaaactgcataatcatacggattaagcatatctactttgctggtgtttgaaccaaaaccggcatacgcattaaagctaactttcggttttccttctgctcctttctttgtagtaaccacaatcacaccattggcaccacgcacaccataaattgcacatgaagccgcatccttcaaaacctggatagattctatttcattatcattaggaatgtttcctgatgcatcaatgataccatctaccacccacaacggatctgtactacctgtaattgaagaggtaccacgaatacgaatctttccacctgatacattcacaccggctgtacttccttgcaaagcatctgtaatacctcccggagattttaaaacttccttcggactcaatgtggcaatagcagaagtcaaatcttcctttttctgtgtaccatagcccactacgaccacattatcgagtaactgtgtatcttctgttaatgttacagttaaatcggttttacctgcaaccgcgatttcctgagttttatatcctacaaaagaaactactataacagaattggaaggcaaatttaaagtaaaacctccttcaaagtctgtaattgtaccattggttgtacccttttgaagcacacttgcacctataacagattccccagctccatctttcacaataccttttacggtaatattttgtgacaaagcccataaaggaatcatacaaaacaacatgaatagccatatcaggcgtaatctaaataagtttttcatcatatttgtatgtttaatagttaatgaaatatttatatgaattgtcatttacgaatagaaggtttattacttaagcaacatacttaatgactaccctaatccaatcaaagagatagtcaatagaatatattaactaataacttacctggtatctttcattttcctgactttagtgtccataggcatttcatttaagattatacatttataaatcatttgatgtaatgcaaatgtaaatcttaatgaacaaaaggaattataccatattaccaacacctatattacatgttacatcatcatcatgtgtgtaacattttctttgtcacatgatacatttaggctgtacaacataaaaaaaggggatagacttctcttctatgcaactttcagcgcatatagaaaagaagcgcccttgtgttacacttcaaacacaaaggcgcttccctccaaacgcaaggacgatttactcaaaacgcacttgcgcttaaaacacaactcttttacgttttaatgaaaacgtaaaggaatttttagagttataaaatcagtaaataatcactattccgcaagcgtttttcccttcctgcgagaataagccaaatgtttcggactgccaatcagctgagctgtataaatgccggtatgaccggagaaaagataagctaccacacaagctatgcctaaataaagacctggctctgccccgaaaagttcaattcccatcagtgtacaagcaataggggtatttgttgccccggcaaacacagccacaaaaccaatgccagccaatagtcccatcggaagaggtaccacagccgacaacgcactgcctaaggtagctcccacaaaaaacagaggagtaacttcacctcccttaaatccgactccaatagtgaaggtcgtaaacagaatcttcagcagaaaatcataccacatctgctgctccgagaaagaagccacaatggtaggtacacccaaaccgatatatttcgtcgttcccatcatccagacagctgcggcaatcacaagtcctcctatcagcggacggaaaggcggataactgatgcgcttggccattcctgaccaaaaaccgatggaacgtgaaaacagcatggctgccaatccgaaaagaatacctgcaccaatggtccacaacaaattggatgcatccggaaaaggaacttcaggaactacataatgcgtatgctccactccccacgcatgacaaaccatgctggctacggcagctgaaaggaaactcggcaaaatggcctcataacgcatgcgtcccactacaatgacctccaagccaaaaacggctccagccaatggggtaccaaatacagaagcaaaacctgcactgattccgatagctaccatcagacgatgatctctgcgacgcatacggaacagacgggaaaactggtcggctatggctcctcccatctgtaccccggtgccctctcgtccggcagaaccaccgaacaaatgagttaatacagtcccgatatatactaacggagccatacggaaaggaataatgtcatgtggtgaacggatttcctcaatcaggtaattgtttccccgggaagccgttcctgcccaataatgatacatcaagccgataagcaaaccagccacaggcaaaagggcaattatccacagatgatgttcacgatactgcgtggcccattccagagatactaacagcaaggcagaagccgaacctatacaagcccctgacaaaactgaaaggaaaagccacttacataaataaaggagtaaaggaagctgttcaaacttccaccagtagttctgatttcttaaagtcttcatatttttctaagttttcttgtatccattatctcaagttttcgcaaaaaccaaagcccgaactctttcacacagcatggatacaaatatagtcctccctgccggtcctaaaaagagacctgctccggtaggaactatcagctacttcattagcggtttatcacagggaagtcccattcccttgattcgaaaatcggctgcaaagatataataaaatccacaaacataaaaaaactgttccccgactctcgtcggagaacagccacaacacaaacacaaaataaaacacgacaaaactactatgcaaaaatacaactctctgctttcatttcagatgaaaatcagctgccgttcattatttatatcacatacacaagaaccacaagagctgtatattacatgtaacgttcataaaatatctttagttcagtattttttattttattaagaattcaaattacatgatacctttttcacggaggtgaacctgccaattccatgcagaacgcaaggtatcttcgatagaagtttcagctttccatcctaattcagagtttgcataagaaggatcggcccaaactttcacaatatcacctgcacgacgaggagcaatctgataattcagtttcacgccggtagattcttcaaacttgtgaatcagttccaatacagaaagaccacgaccagtaccaatattgaatacttctactttatctttctgcttgtcttccaaaatacggttcatggcaattacgtgtgcttttgccaaatctactacgtaaatgtagtcacggatacaagaaccatcaggagtatcataatcatcaccgaatacgctcagtttttcacggatacccatcgcagtctgagtaagatatggaatcagattctgcggtactccaagcggaagttcaccaattaaagcagttggatgtgcaccaatcggattgaaataacgcaacattacagcgtgaataggagaaccagaagtaattgtatcacgaataatttcttcgttaatctgcttcgtattaccgtatggagattcagctttcttaataggagcagcttctgttacaggcaatacatccggctgaccgtataccgtacaagaagaagagaaaataataccttttactccatgtttcggcatcagttccaataagttaatcaaagaaaccaagttgttacgataatacagcaacggtttctgaacagactcacctacagccttgcttgctgcaaaatgaatgattccctggataccaggatatttagtaaatacgttattcagaccttcgtaatcaagacaatctactttttcaaaagccgggcgcacacctgaaatctgttcgatgctgtccaccacatcagcgcgcgaattggaaagattgtctacaattaccacttcgtaaccgctattctgcaattcaaccacagtatgagaaccaatgtatccggttccacctgtcacgagaattctttttttcataacactaaggtttatcttataattaactcctttattaaagtcatttactatatctctacaaaagtagaaaaaaggattgaattgtccatgtacctctcattaaaaaattaaaaaagtgttacccgccatgtgacggataacacttttacaacaagtaactgtcaaaagacaggattaattcaaaccaaaaagtactgccagacctttatctacgcctgagaagcccatgaatgccatagccagcaaacctgctgtaaccagcgcaatgctcattcctctcatacctttcggaatgtttaccaggctcagttgctcgcgaataccggcaaacacaatcaacgccaaagcaaatcctaatgcagtagagaaggcatatactactccagtcagcaaatcatagtctttctggattaccaggatagtcacacccagaatacagcagttagttgtaatcaaaggcaggaacactcccagtgcctgatacaaagaaggagaaacctttttcaagataatttctaccatctgaaccaatgcggcaatgacaaggataaaggcaatggtctgcaagtatcccaatccaaaagcgtccaatacaaatttctggatgacataggtcactatggtggccagcgtcaacacgaaagctaccgctgctcccatacccatggcagtttccactttcttggaaactcccaagaacggacagatacccaagaattgcgacaacactacgttgttcacaaagattgcggtgataaatatcaatatatattccatatctttctatttttaagggttatgcttttttcaagcggtttacaatcgcaataaggtatcccaatacgatgaaagcacctggagccaatacgaaaatcagcattccgtaatcttccggcataatggcaatgttaaacaatttgccagttcccaggaattcacgtacaccacccagcaaagtcaaggcaatggtaaatccaagtcccatacccaagccgtcgaagaaagaagacaaggggttattcttagctgcaaatgcttcagcacgacccagcaaaatacagtttaccacaatcaacggaatgaacaatcccaatgtagcgtacaatgccggtacgtatgcctgcatcaccatctgaagcaaggttacgaacgaagcaattacgaccacaaaaataggaatacgtaccatgtcgggcaccagattcttaatcagagagattaccacgtttgaacaaatcagtacaaacatagtagccagtcccatacccataccgttgatggcagaagaagttgtacccagggtcggacacatacctaaaaggagtacaaacgtaggattttcttttacaatcccattcattaacactttaaaattattcatagcctgtcctccttatttaacgggttctacattcgttgtatcactcacagcttcttcggccggtttttcctgctgagtagctccgctggctccatctacatgctgattcttataggctgcatacgcattgtttacagccagcaagaaagcacgcgatgtaatggttgaagccgtaatggcatcaatctctccgccatccttgctcaccgttaaaggagcttcgcccggattttttccggtaatatcacctttggcacctttcttgaaccagtcggcagccttcgaacccagtcccggagtttctgcgtggctcaaaagagaataatcgataatcttaccttcattgtcaaaaccgaccaatacagtcagcgctccaccaaaaccgttggcagccgattctactgcagctccgataggctgtccgttcttagtagccttgtaaatcttataagtggcaccatttacttctacggtttcaggagcatcagccggattgttatcaaaaccgggaactaccactgcaatggcatcactcaaagtcttggcattcgcctgagcaataggttctgcagtcacatcgttcacccagcccagcaaacctccggccactacggaaaatccagtcagtgccagagccatattctttaaagatgattctagttttttcatttcttcactacctccccgaaacgttttggtttacaatatgtattaatcaacggagtgaatgcgttcatgatgaaaatagcgaacgacataccttccggataggcaccgaaagtacggattaccactgtcaggaaaccaatagccacaccataaatcaacattcctttgtgagtcataggtgaagtcacatagtctgtagccatgaaaattgcacctaacatcaaaccaccggtaaacagatgtgccaacggagaagcatatactgtaggattagccaagtgcatcagacctgagaatacgaatacggttgccagaatggaaaccggaatatgccaggagataatctttttccacaacatatagacgagtcccagtaacaaagctaaagcgcttacctcaccgatacatcccggattgttacccaggaacaaagacatggtgtcaggcaactggctcaatgcatttgcatcgccatgtaccgccatcttcatcaaagccaacggagtagcagtagtttccgcatccgtatagctggtcagctgaccgactaccggccatgaagtcatctgtacagggaaagaaatcagcaggaagatacgtcccaccaaagccgggttgaacgggttacatcccaatccgccgaaagtcatctttccgataccgatagccaccagcgcaccgataataataacccacaacggcaggttagaaggcaggttgaatgccagcaacacacctgtcagggcagccgaaccatccatgatagtagtacgttcgcgcttcaatatgaatttggtgatagcccattcgaagaacaagcatgcaatgacagaagtcagtgtcaccaccactgctcccagaccaaacatgtaaaaagatacaagcaaggccggtatcagcgcaatcaatacgccgtacatgtttttctgtacactgtcgccaccatgtacatgcggcgataaggatactattaatttgtttgccataagattctcaaattatttttttgcattacgtgcacggatgataccgcccaccttacctttacctaaacggatgtaatccaacatcggacgatgagaaggacatgtaaactggcatgaaccgcattcgatgcacgacataatcatttcgtgttccacacgttcccagtcgccatgagccgaacaagtagccagcaagtaaggttccagtcccatcggacaaacgcttacacacttcgcacaacggatacatggctgaggttctgcacgacgtgcttccttatcgttcataatcagcacaccagagctacctttacagataggtacttcggtatttaccaaagccttacccatcatcggaccaccaccgattacttttccggtatcttccggcagacctccggcagcttcaatcagctggctcatcggagttcccatacgagtcaggaagttagaagggttcttcaatgacttaccggttaccgttaccacacgttcaaacaaaggcttgtttttctgtacagcttcgtatactgcatacgcagtacctacattctgtaccactgcacctacattaataggaatagcaggaggagccggtacctgacgaccgataacagcgtcaatcaactgtttttcacctccctgaggatatttcactttcaaaggtacaatttcaatacctgggtaagcggccgccttttctgtcattaacttgatggcatccggtttattgttctcaataccgatataggctttgtttacctttgctcccttcatcagaatctgtacaccaaccagaatttcatctgctttttccagcatcagacgatggtcggcagtcagataaggttcacattctacggcattgatgatgacacattctgccttgcatccaggaggaggagtcagttttacatgagtagggaaacaagcaccacccatacctacgataccggcattcttgatttttgcgacaatttcttccggagtcaggttacattcctttaccagatccttgctacggtcgattgtttcttcccattcatcaccttctacatcaatgaaaattgcaggcttgcgatagctgcttgcatcaatcacgctgtctaccttgtttacctttccagacacggaagagaagatagctgccgatacaaagcctcccgcttcggcaatcttggtaccaacctttaccacatcacctttctttacaatggcagtggcaggcgcaccaatatgctgagacaacgggaacaccgcctgcttgggaagtgcaagcgtttcaatagctttcccggctgacaatttattttctgctggatgaactccaccaattctaaacgtcttcacttttatgttatttagtattatacaattataagattaagcctctgtattctttggagcttcggcagccggagtagaagccgtattcaccgtttcattctttacagctactggctttgctgcactagctatagcagcctgtcctacagcctgtttttctgctgccggagcatctgccttcggtttacgaggagggaagttcactgctacaatagcctgctgcggacattccatctcacacttacggcatgacttacatttagccgggtcgatataggccaggttgttttccaatgtaatagcttcaaacggacataccttcacacacttgccgcaaccgatacaagctgctgcacatgccttacgggctacagcacctttatccttattgacacactgtacgtacactctacggttgttcttgcctttcgggcgaatttcaatgatgttacgcggacaagccttgctacaagcgccgcaagccgtacattttgattcgtctacttcaggaagtcctgtttccggattcatgtgaatggcatcaaactgacaagccgatacgcagtcaccacatcccagacagccaaaggtacaaccggtttcaccaccgaaagtagaattggctaccacacaagaacgcaccccgtcgtactgagtcagcttcggacggttggcacatgttccgttacatctcactaccgcaaccttcggttctgaagcagctgcttccagtcccaaaatacttgcgaccttctccattgtaggctgaccgcctaccggacacatttttccctccagagaaccagcttttacacaagcagctgcaaaaccggaacatcccgggaaaccacatccaccgcaattggcctgaggaagcacttctgccacctgagcaattcggggatcttcatacacagcaaatttcttagaagccacgtacaagataacagctgaaatcaagccaatggcacccagtgaaatcactgcaaccaaaattaaactcataatataaagttagtttattaattattaattgattccaaaacaaacacaaaagtacgtctgaatttctcccggcaaaagaaaagtatcagataataaggtataagcatacacaaagatgcgatggaagaaacgacctcatcccctcccgtaaaatacatagcgacaaaaagagaaacgagcaacaccacaaaagggaaaacaaaagcccacattacagctctcattcccagggatgtcgctccgcttatcatgacctggctccctacctgacaggcgagaccagacttattgtatacatctatcagtttctccttcgattcagccgcactgcaatgcccttttatgctgcaggcagaacaagctgacgtctgtacaatcctcaccttcaagtaagaaccgttaatgctttccacaatacctagatgttttattttatcagtcatttttgcaaaccacactttacaaatgtgtggcaaatgtacgataaatattgtattgttggtaacgttaacgaggaaaatctgcttaaaaaaattaaattcgtcaggacaagttcagaaatccgacaaattacagctctcctacttaatttacgatggtgtatcctgcctccagcagtgcatttcgaataagtgaaatgtgctccgcattacgtgtttccatcaccagtctcaggaaacaggctgtcacattactattattattgttacgttcgtgaagtactgaaatgatatttcctcccagacgagccacaatagtagctactcccatcagttctccgggtttatcatgtaaatcaagcgttacagtataagagcggccagacatatccaatccacgtccaatcacacggctcaggatagttacatcaatatttcctccggataccacgcaaattgttttcttccctgccaccggaaccttattgaacatagcagctgccacagcaactgcccccgccccttcagcaataagtttctgctgctccatcaatgctaaaatagcggcacagatttcatcttctgtcacagtcacaataccatccacatacttgctacacaaatcaaaagtatgttctcctggttcctttactgcaataccatctgcgattgttgacactgaagaaaggcattcgcgacgttcatgttcaatagagcgcaacatactcggagcaccttgagcctgtacaccatatacctttacatcaggttttaaagatttcagcgcgtaagctacaccagatataagtcctcctcccccaatgggcacaatcactacttccacatccggaagttgattcaacaattccagtccgattgttccctgtccggcaatgacatgttcatcatcaaaaggatgaatgaaagtatatcctctttcctccttaagctgcaaagccttctggtaagcatcatcataaacacctggaaccagacatacctcagctccgtaacgcttggttgcctctactttcgaaataggagcaccttccggaagacaaatcaacgattttatgccatgcttcgtagcaccaagtgcaacaccctgcgcatgatttcccgctgaacaagcaatcactccacgagccttttcttcctctgtcaagcaagaaatcttgtaacatgcaccacgcaacttaaacgaacctgtatattgcaggttttccggtttcaaatatacctgactctcattatttatttggggagcatatatcaaatccgttcttcttatcacatttttcagagcaaacgatgcccgataaatacaatccaatgttaacataaagatagcttttaattattttttccgcgcaaaagtacaaaaaaagtcgaaattcagaagaaacaaataagaaaaggcacccaaatacaaatcttgcatggatgcctttttcttataaatcttcatctagaaaagtaaaatcaattcctctttcttttaacaaatcgcgaattttagctatgatttttttataaagcttgaaacaagtcgatttacttatacctctcttttcgcccgcttctctaaaacttaaacctttaaagaataggtctataatcaattctctctcaaacaaagaaagctcgaaaagtattatttcccgtattatcagataaacacgctcaaacttcaacaaaagcttaatttttaatgaaggatatcctgccgtatgagccaccacagcctcattatcaagtgcaaccatagtgggagcatttttctttctgcgataataatcatttaccatattaattgttatcgtcattgcccattgaaaaaaacgtcctctttcatggtacgacttatccaatccttctaccactttcaacaatacttcctgacgtaaattgtagacatcttcctgattacgaacgtgtattttaatatacgtttccaccatcaatgaacatctgtaaaaaagaatttgttcttccttatcagttttatcataaagatgacgaaacctcactttgttactggggtaaagtttttccatatttaaaatgtttttaagtcctacctaaccaaaattacattaaaagaaaagcaggatggttaataaaaaattttatcactaaataaaaccaccatataccaaaagagtccacctacttttaaaatatctagcaaagccttattcatgtgacaaatatatatattctacatagaataaacaacaaattcgcaatttatttttacaatacattacaatttgataaaaataaaagaggcatcaaaaagagattttttgtctttttgacgcctcttacagagattcaaaagcttaatcaagcttaagaaccgctaaaaatgccttttgaggaacttctaccgtaccaatttgcttcatacgtttttttccttttttctgcttttccaagagcttacgcttacggcttacgtcacctccataacatttggccgtcacatccttacggactgccttaatggtttcacgcgcaataatctttgcaccgatagccgcctgaatcgcaatttcaaactgctgacgaggtatcaattccttcagtttctcacacattcggcgtcctaaatcatacgcattatcaaagtgagtcaacgtagataaggcatcaaccgattctccgttcaacagaatatccagcttcaccaatttagatggacggaaacctgactgatgatagtcaaaagaagcatatcccttggaaatactcttcaacttatcatagaaatctatcacaatttcacccaaaggcatcttgtaatgcaattctacacgattacctgaaatataatcctgcttcaccagttctccgcgcttacccagacacaacgtcataatcggaccgatatagtctgttgccgtaataatggaagcatcaatataaggttcttcaatatgatcaatcagtgtaggatcgggcattcctcccgggttatgcacttcctgcactcctccctgcttatcgtaaatcatatacgatacgttaggaacagtggtaatcacattcatatcaaactcacgatccagtcgttcctgcacaatttccatatgaagcaatcccaagaatccgcaacggaatccgaagcccagcgccaaagaagattccggctgaaaagtcagagacgcatcgttcagctgaagtttttccaaagaagcacgcaaattttcgtaatcttccgcttcaatcgggtaaactccggcaaagaccatcggttttacttcctcaaatccatcaattgccttatcacacgggcgactgatatgtgtaatggtatctcctaccttcacctctttagaagtcttgataccggaaataatgtatcctacatctcccgtacgcaactctttccgaggaaccatatccattttcaatacacctacttcgtcagcatcgtattcttttcctgtattgaagaatttcaccttgtcacctgtacgaatcactccgtttactaccttaaaatatgcaatgataccacggaatgaattgaatacagaatcgaaaattaaagcctgcagcggtgcattctcatcaccaactggagctgggatacgttctactaccgcctgaagaatatcctctactcccataccggtctttcccgatgcacgaataatatcttcacgcttgcagcctaacaaatcaataatttcatcctccacctcttccggcatcgcactagccatatcacacttgttcatcaccggaataatctccaggtcatgttccaacgccatatacaagttcgaaatagtctgcgcctgcacaccttgagaagcgtcgacgaccaacaatgctccttcacaagctgcaatggaacgagacacttcgtatgaaaagtccacgtgtcccggagtgtcaatcaggttcagaatgtatttttcacctttataagtatactccatctgaatggcatggctcttgattgtgattccacgttcacgttccaggtccatatcgtccaacatctgtccctctgtaaccttaattgtctgcgtatattccagcaaacggtcagccagtgtagacttaccgtggtcaatgtgtgcaatgatgcaaaaatttcggatattcttcatatataatattacaacttatcaaaattattgggcaaagatacgcaaaaaatgagatttttatgtatgtttgccattgaaactaatcataaaacataaataacacgtatgaaaaaaacatggattattgttatcgcagtagtagctgttcttgtgatttactgcgtcagttcgtataattctttagtcactcaggaagaaaccgtaggcactgcatggagcaacgtagaaaaccaatatcagagacgctctgacctgattcctaatctggtcaataccgttaagggatatgccgcacacgaaaaagaaacattcgatgcggtggtatcagccagagcaaaagctactcagatgaccatcgacatcgaagacctgactcctgaaaaaattgaagcctaccagaaagcacaaggagctgtgggcagtgcattgagccgactgttggctgtgacagaaaactatccggagttgaaagccaatgaaaactttaaggaactgcaggcacagttggaaggaactgagaaccgtatcagcgtagaacgtcgtaaattcaacgaaactgcacgcgaatacaataccagcatccgccgtttcccgaaaaatatcgtcgcaagcatgttcggttttgaaaagcgtccttatttcgaagctgaagaaggcagcgaaaaggcacctgaagtgaagttctaacctaccctcttcacaatgaaacgaacatctttattcggaatactctttttactggcaactgccttcagcactttgcgagctgaaggatacaaagtagaagaggttcccatggtacacctgcaagaccggacacggtatgtcagcaatcctgacggaattcttagtgaagcggctgtagctgtaatggataccaccctctttgctttggaacagaaaaccggcatccagaccgtggtcgtagccgtacggcaaataaaaggcggtgattgtttcgactttgcctaccaactgggagagaaaaacggagtaggccagaaaggtaaagacaacggactggtcattctgctggtcacagaagaaagatgtatccagtttgctaccggatatggactggaaggtattcttcccgatgccatctgtaaacgcatccaaacccgttacatgaatccctatttaagtaaaggtgactgggattccggtatggtagccggtattcaggccgtacgacaagtactggataaaagttccggagctcccactcctcccgaaggtgaatcagacggactgctaatttttatcatcctgggatgctgctttatccttgtacctgccttattatggtattccgcacgccaacgaaacaaatgtccgaattgccataagcataccttacaacaggtttcagttcgtaccatttcacgcgtaggcagcgtacgtaccgaagaaatcacctatctgtgcagcaattgcggacacgtacgtcacactcaccgaaaagtcgatgacgacgaattccatcaccggggaggcaacggaggtcccttcttaggcggtccgttctttggaggtggtttcggaagaggtggaggcggcttcagcggcggcagttttggaggaggaagcttcggaggcggtggcgccggaagcagattctaatcacaatcaattataccatacaacgatgtacaataacacttttggaaatatcttccgtctcaccagtttcggtgaatcacacggaaaagctataggcggagttatcgacggatttccggcaggtatcgccatcgacatggattttattcaacaggaactggaccgacgccgtcccggacaatcggccatcaccacagcccgaaaagaggctgaccaggtagaatttctttccggaatatatgaaggggtatctaccggatgttccatcggatttgtggtatggaataccaaccagcattccaacgattataacaacatgaaagacgtattccgtccttctcatgccgactttacctatacacaaaaatacggtatacgcgaccaccggggaggaggacgttcttcagcccgtgaaaccatcgcccgtgtagtagccggtacccttgccaaactggcattgcgacagctcggcgttcgcatcacggccttcacttcgcaggtaggagaattcaagttggataaagactataccgcatacgatttgagtaccattgaagacaatccggtacgctgtccggatcaagaacttgccaagcagatggctgactatatttaccagacaaaaggagaaggcgataccatcggtggtgtcatcagctgtgtcatacaaggatgccctatcggattgggccagccggttttcggcaagcttcatgccgccttgggcaatgccatgcttagcatcaacgctgtcaaaggctttgaatatggacaaggtttcagtcacatggagatgaaaggcagccagcaaaacgatatattctatcgtaacggagagaaaatagccttccgcaccaaccgctcaggaggtattcagggaggtatcagcaacggccaggatatttatttccgcgtagccttcaagccggtagctacggtattgatggaacagcctacagtcgacatctatggcaacgaaactattctgaaagcccgcggacgtcacgacccttgtgtgttacctcgcgcagtccccattgtggaagctatggcagctatgacgatactcgattattatctgcttaataaaactacacatctgtaaataaaaataccatggaaatcaaacaatacatccaagaaaatgaagaacggttcctgaacgaactgttcagccttatccgcattcccagcatcagtgcacttcctgcgcataaggacgacatgctggcctgcgcggaacgctggcgtcagctactgctcgaagcaggagccgatgaagcgatggtcatgccctcagaaagacatccgttagtctatgccgaaaagcgtgtcagccccgatgctccgaccgtactggtctatgcacattatgacgtcatgccggccgaaccgttggaattatggaaaagccagcctttcgaaccggaagttcgtgacggtcgtatctgggcacgcggtgccgacgatgataaaggacagtccatgattcaagtcaaggcttttgaatacctcgtacgtgaagggctgctccgccacaatgtgaaattcatttttgaaggagaagaagaaatcggttcgcccagcctgaatgcttttctgaaagcacacaaggaactgttgaaagccgatgtgatcttagtgtccgacaccagcatgttaggggctgacctgccgtccctcactaccggactaagaggactggcttactgggaaattgaagtaaccggcccgaaccgtgaccttcactccggacatttcggtggtgcagtggccaatcctatcaacgtgctctgcgatttactttcaaaagtcatcgacgcagacggacgtattaccgttcctcatttctacgatgacgtagaagaagtaccggctgccgagcgcgaaatgattgcccagattccgttcgacgagaaaaaatacatggaagccatcggagtgaaagccctgaaaggcgaaaaaggctattccacactggaacgcaacagctgccgtccgtcattcgatgtatgcggcatctggggaggatatacaggcgaaggttccaagaccgtattgccttctaaagcctacgccaaagtttccagccgtctggtccctcaccagcagcatgaaaaaatctcccagctgtttgtagactatctcacacagcaggcacccgactatgtacaagtgaaagtcactcctctgcatggaggtgaaggctatgtgtgcccgattgaccatccggcttatcaagctgcagaaaaaggatttgaaaaagctttcggcaaaaagccactggctgtacgtcgtggaggaagtattcctatcatcagcgatttcgaacagattctgggtattaaaaccattctgatgggattcggactggaaagcgatgccatccactccccgaatgagaacttctcacttgatattttcagaaaaggaatagaagccgtagtggaattccaccaacaatataaataacactgcacaaagcacattcctaaagggcactgcacaaggagaaacaaatacactcactccttgtacagtgctttcattcttaatgctttcgatgcttatctcttttcggtacgcagcaaataaagccacgtgttatcttcccacgcaccgtcttcctgaataatctggaaaaatagttccatttcttctacctcttcctccggaagcccttctgctcccttagatctgatatagcgcgagacagctctttgacgatacggactggcaatattcagatacaatgagccggagttatccccccttgcaaaatacataggcaggaagtctcttccgtcattaaagaaatcggtgaaaaaaattgaacatggcagcggctccccaatcagttccgtttccacacaacgagactgttcctgcgtaaaaatccaattcatacggttcggtatcatactggaaatatcatattgcagcgtagcaatctgcacaaagttctcttctcccacttctctcacaaacacatccagcgtagcgtccgcatgaaatatcacccgcatcatctccgtacgttgagccaccctctgccccattttgcgcagcacatctttcaccaaatccgtttttttccatacttgtccgttccattccacttctcccggaccaccaactattaacgacagacagtcctctccaaaatgaaaatcataaggcgtgtccagttcgatacaggattcgttcatctgataccggcaggtgatggacaattttttctcctcttcctgtggcatgaaatacccttccacctccagatcataaggctttccggaagactttccggaaaaaacaatttcagacactccaggaactacatccaccgccagtttaatgtcatccggaagtaaggatgaaatcgtcagctgtagtttggtcgtatccgattctatcgcatcaaattccactacgggatatgcccatgcatctttcactcccaatgctttcccgttccattggaaatcaaaagccgagccagaaaaacgaatctcacacatttcactctccgggttcagtagcggcaatgcctcttcatttttacaggaaaagaaaagtaatagtatcccaacggacaaacatttcaaaaccgttctcatattctttcaattaaaagttaacaaaatcagttctcaatgggaacaaatggatatacattgtaataccagtcaccagaattataataatcccatcggaacctagggacaaaagtatggcttgacacaatcgtattttccctaccattattttccactttcatttcaacagttaccactaatatataacgtgacataaaagtcaaatgaggaaccgctccttgttctccttctggagtattaggtaaataaatttcaaaaggcgccttatctccccaattccatagttcctctccattcttatctttcaaaacgactccagtataaatataaaaaggtggtctatatacctcgtcatataacaactccgaagaaacaggtcttcgctcattatgcacaccactggtaccttcatttaatgcatcatataaaacagtatgactcgtttcataaatttcgcctttaacagtataactttttaccgacgacaacatttccggattcaggtttaaacagtcatccaaatccgaagcataaaactctggtcccatggactgatatatctgaactgcttcatcgttatcctgcttgtaatgagtagcataaggagagagtcttaaacacggataatcagacaaactccatacacccaaacgaccgattttgtctggagaaagagacaatgtgaaagggggtatcaaacctgtggcaagcgtttctatctctccagaaagagttacctttccattcgtctgcaacataacggtctgtacggtattttttttccctatcaaacccaccagtaaaagcacctaataacgtactaactccagaagaaacaagactacctgccccttttacaattaaagactttatttctttaaatactttctcgctttcaattgctttctccacccacttctctgctttatcccctgcatatttagctacagatttcactattttatctcccttattatatgttgttgaagaaagaatcagtccttctgtggtactttcaaaatcaccatctaattcaattgtactagtagtacatgaatgtggaattatttgaagcgttcctccttttaaattaggatcatacgccaactctgtctgaaaacaattccagcccacggtatatcctttagaatcatcatttgatatattgcctacataaatatcataaatatccttccttgtagacagttccgcataaacatcagaaaaagctaaacaagattgaggaatctcaaaatgcaatttccacattgctgtattctgtaaattcgcttgttctggctccaaataataaaaaacttttagtacccccgtatacttattatgaaaaatcagataattcactcctaaatctccataaccattaactgtatgggcaatcaactcccatccatctacagattttatgtccattcttatgtcataaggaatcgcagttgtagactgagttgtattccatggcgtattaacatgatttcctgaagataatgttaccttttcccattcctcccaattcaattgtcccgaacgactacgtcctgcatcggacttaggataagcaactaattcccgaacagtaggtaatgcctttactttttcttgaacttccaattcatttgaacaagacattactcctattccatatagaaacacacaaaagaacaatgattttttcataaccttagattttgatttcgcaataaatatacgttttttcttttagaaatacaactcccggacaagaaaacatatattcatttagtcaaaataatacacggctcttccattttcccagtactttcctagaagtactggagtaccgccggggaagtaccggagtactactgaggaagtaccggagtaccgctgggaaagtactgatttagttaaatgaaagagccatggccaataatatcaactttcaatgcgcgcgagaaacaactctattcttccactatcagttccagcagcaccggaagatgatcgctatatcctccgtgataccgcattcctttataggtgcggaaaggcgtatcccctccatacacattatcttcttccaacaaaaaagggaaacgtagaatagagactttttcttttgaagtccttgtacgagcatccggctgcaacagagcaccgttcactaccatctgatccagtacaccccactctcctttataacgataggtccctccctgctggttatccatcagattatacaaggcacataactgcggcttttcagacaaggcagacacacgaagcccttcctgcaacgactttccatcaggatagtcattaaagtcccccataataataagacggggattctgccgctcagccatgaccgaatcagcggcttgacggattctgcgggccacccacaaacgatagggatctgttttctttgcccctcctacacgcgagggaagatgacagacaaagacatctaacgtatctccgcttaccacacgccccgatacgtacagcacatctcgcgtaggacgcatacccaatgaatctgacggaatacgaattttctgtgaagcgagcaagcggaacgagactggttgatacaacagagccacatcgatgccacgctcatcgggcgagctggtcatgacatacttataacccacttcacgaagcggagaataacgggtcaagcttttcaggcaatagtcattttccacctcacacaaacccaccaaatcaggcacctgttcctttcctgctgccagtatcacctttccaatcttgttcaccttatcctgaaagcgacggtacgtccagttccgtacactccccggcaaaaactctgtatcctgctttaaagaatcgtgacggcaatcaaacaagttttccacgttgtactccatcacccggaacgcatgctgtgcctgagccggtgcggcactcatgccgcacacagcccatagcaagctataaattagttttctcatgaacgagccggaatatttaccagcacatccagcagatgacgccagaacttgtccaccgtaggaatcagcatgcgttcatccggtgagtgcacgccacgcagcgtcggtccgaaagaaaccatatccaatgacggatatttctccaggaacaatccacattccagtccggcatgaatcgctttcactttcggttccactccaaacaaacgtttatagctttctacagccaccttcagaatagcagacgacggattcggtttccatcccggataaccgtcaccggtcacacaagtagctccacccagttcaaatgcagaacgtaccatctgcgacatatccttgcgagaagaaaggatagaactacgctgactggtcactaccacaatcttgccgtcacgcatcttcaccgaagccaagttagaagaagtctccaccaagccttccatatcctgactcatggcatacactccgtgatgcacggcatacagggaatgcaggaagcgtgtcatggcttctttctccatcacctccgcacaaggagtttccgactccagttccatggtcagattcggttccgtcaccgcaaactcattctctacctcagccaggaatatattcaatgccacccgtacattttctttatcagccatcggcacggcacaaacggcatgggcttctctcggaatggcattgtgcaagttacctccgtcaatgtggctcagacgcaaatcatactgcttcatcaagattaccaggaaacggtcgagcaacttgttggcattggcacgtttcttattgatgtcgtcaccagaatgtccgccggtcaatcctttaactgccacacggaagaagaaataaccttcaggagctgctgtcatagggcaagggaattcagctgtagtaccagcacctccggcacagccgataaacaattcaccttcatcttccgaatccaggtttatcagaatatcgccgctcatgaaaccttctttcaaggcaaatgcgccggtcagtcccgtttcctcatctacggtgaacaagcactccagcggtccgtgctgaatatcatctgcagccagcacagccagttcagtcgccataccgataccgttgtcagcacccagtgtagtacctttcgccttcagccattccccgtcaatgtaagtttcaatcgggtctgtttcaaaattatgtaccgtctggttgtttttctcgcataccatgtccatgtgcgactgcaacaccacttttttcagattttccataccagcggtagccggtttgctaatcaagacatttccagcctcatccactttatattccagcgcataggcttttgcaaagtccaccagataattcctgattttttcttccttcttggaaggacgcggcacacggcagatttcttcaaaataatgaaaaaccgatgccggcttcaaatctttcttttccataaaagtatttcaataaacgattaaaaattagatgcgaacaaaagttaaatacagcgtttttcctcacataaaaggcatttttaaagacaaaaccctgaggaatcgtgacaaaaactatatctttgcaccacaaaattaatagaaatgctcaagactctcctgataactttgttaatagttgctatctgcatagcgctattatcggtgaaaatacttttcaagaagaatggacgcttccctaacacacacgtcagcggaagcaaggccatgcggaaaagaggcatcggatgcgtgcaatcgcaagaccgtgaagcccagcgcatcaatccccacgccattcctgaaagacagtcggcagcaacagaacaatgaagctaataattaactaaaaaacgatatcaatatcattatgaaaaaaatgaatgttttgaaaggactcctggctcttgccgtagtattcctgtttgcacaatgcacagacaacaagggaacttctactgaagcttctgctccggcagtagcaggtacaaatatgaagattgcctacgtagaagttgattcgctgctcactaaatatcgctactggaatgacctgaacgaactgatgattcagaaggaagaaaacatccgtacgacattgaatgaaaaagcaaaagaactggacggcgaaatgagagaattccagcgtaaactggaaaacaatggttttgccagccgcgaacgtgcagaacaggaaaacgcacgtctgttgcagaaacagcgtgacttgcagcagttgcaggaaaagctttatgctgacctccaggctgaaaaccagaagaacagcttgcagcttcgcgattctatcaactcattcttaaaagtatacaaccagaaaaaaggctacagcctgattatcagcaacactcagttggacaacctgttgtttgcagacaagtcactggatattacacaggaaatcgttgacggcttgaacgcacgttacactcctagcacaaagaaataaatactcatttgattttatcatactaaaaagtccggccattgcgaccggacttttttatttcctgcagatgcatcttttacatctcattgagcaaggcattcagctcactcaccatcagggcaggcgacttcttattcgtctttatccaaccttccggagtaaattccgacagtttggcattcagcttcttcaattttccgtttgctcccttggcagccagttcttcccgaaggatatggattttctcacaatcctgcaaaccttccaccagacgttcgaaacggatactactacgcggaccaggatagatgctgtacgtatcaccagctgcccacgtacggaaacgtgaatcgcgtagcggatccattggccagctgtttactgcccagcgaagataaccgtcatatcctccagccaccgcatgaagcaccgtccaggccgcttcagcaggttcagagaaagtaaatgtattagggaaagcctccgtacaacaagtatacaccgtactgatttgccctttccgttcacgttctgcctttacctcttccgggaactgattgccataagggatactcaaataatacaaatccccctgaatctcctcatggtaattgccggccagcgtaatcttgaattccggatcggccgccttaatcaccttaatagcttcacgcatagcctccatcggacgttcgtccatagaaatggcagtcttttcaaaccaccccttctcacgtaagtgacgagagaaatctttcaggaacgtaccccagtattcagcgtaggcttcctcacctggagcagccttgataaactgcacgcggttggtagcctgatcaaaataatcaaagctcaacgcccatggaatcatcgtgtagcagctaatcaaatccttgatacccacttcgttcatcataaattccacccacttgtcgaacaccgtataatcgtacacccacgtaccgtccagcttcttcatccggaaaatcatgctgtcgtaatggtcctccgtctgtccggcccacggcttgtgcatgatgctggcaataatggcccgctgtcccgcattggccagcatcttcataataggacgcatggcatcaaagtgctccttgctccacaacggcacctgatagtaacgcgccacggcatacggattctgccacaagtccaaatgaaacgcccatttctgcggttccggcaacgtgcggttcactacctcaatttcaaacggcagtttcatggcttcaaaattctttccagataccgtcagcgtacctttatacttcccggggcgtgtatcagcaggcacccatacattcagccacacgggctgcgtactgcgcgcctgaacttcgcgtacccgcacaatgtcaagcacatcggccaccatggaagaatcccattccgccttattctcacgagggccacaacctccgcttccatctttatttaattcatccgtcattacataacgtacgaaatacgtattcacggccgaggcgggaattaccgaagaaccgttcttcaattcactgacagcaatttccgctccttccagttctttctgcgtccaaagcacagcctgtgcattcacacgctctcctttccaagccttcagccggagcataccagtcattttcacgtcgggcacattcagtttcttgtaacgcacatccgtcgttccccaacaaaaccgaaccggagcagtcattttgctccacacctcttccccgtcgtgcggcttcgtatcggtcagttctacataatctcccagtggaaacttttctgcctgctgagaaaaacaggccggcccgcatgcaagcagtgccgataaaaacaagatttttttcattacttattatttaggtttagtgctaacttaaaagtacagaataaagccaatgcttatctttacaaatttacagaaaaatgcctaaaacctctatggcaaacaatgattttttgccaggctattactctacaaaatgcccaactccttcgctacccgacatgcttcaatggagcttttcacctgaagcttgctcaaaatctcctgacggtgccggctgaccgtgtgcacactgatagaaagctggctggcaatctccttgctcatcaagcccttatctatcaaccggagaatttgtttctctctgtccgacaagatttgtgcatcctcctgaccgcctaattccatcatttctccagtaaccgaatgaactaccctattcttgccggaaaagccaaatgaccatggagtatacacgcataatgccagccacaaactattccctataggagagggaacataaaataaccgatgcagcacaaactgatagtttccctgcgcatcctttatacgtaacttattggccagataaaaatcagtccgctttgtcttgggctgacgtcgcacaaagtgaaagaaacgaagctcctgcaaatacttgtcgtgcaaatcatcgggatgaatctgcttcaaaatctcttcctcccaaatagaatctattttctcttccgtgccattctcacgattccagccaaacacctgagaaaagcgcccatagtacacgtaactcacattcgtatgcatatcactcagcacagataccgcattttccatctccgcataccccatggcaatttgcttgtatctttccaactcagccatcggctgttgccctaccttgtaaagcgatttctgtttcgaaaactcattgttcagttcatcgactatattcatacgaaaatggttattaataatcattgcagattcttttccggcatcttacatttgcaaagataacttcccgacgaattttatcagcaaatatatcaaaggaatcgtaattacattatcagatatgaaaaaacgacttatattaggcatggccttctgggcatccctgcaatgcggaatggcccagtcactggaaaaaatgcaatggttcaacgaacccgaacaatggaaaatagaaaaccagacactgaccatgtacgtcaccccgcagagtgactactggcgcatttcacactatggttttaccgtagatgatgctccgttctattacgcaacttacggaggcgaatttgaggtcaaggtaaaagtgaccggagactataaaacccgtttcgaccaagccggcctgatgctgcgcattgatcacgagaactacatcaaaacaggcattgagtttgtagacggaaaattcaacctgagcaccgtagtcacccacaaaacctctgactggagcgtcatcacactggacaagccggttccttacgtatggattaaagcggtaagacgactggatgccgtggaaatattctattcgttcgacgacaaggaatacgtcatgatgcgaaatgcctggttacaagacaacactcccgtacacgtaggacttatggcagccagccccgacggaaacggcttcaatgccacctttgagcatttcaaagtgaaacaccttcctgaccttcgccgacaggaatggttgaaaaagaatgtggaataaaagagtttatgagcttaattccccaggcatttcacttaacattcagaaatgcctggggtatccattggcaaactttcttatataatatgtcggaacacatatttttttacctttgtaaaaaccaaccactatgttcgaagaccagacaagaaagtaccaatcataacacaagcacacaaaaaagacatcatgaaatcccaaagagccaaaaacgcagtcagaagactcctggtgagtatcttctttttagaatgtataggaatgacttcggtgtatagccaagtacatgaggcaattaaaccttatgtagattccggtttttattgatagcgttatctacacatagtagaaattacttagtcatatagacacggaataatgaaacacgatgaagccgtatctacacatagtagaaattacttagtcatatagacaa

SEQ ID NO: 3760 - DNA, 32982 bp, Unknown
  gut microbiota DNA sequence
tccggcatacctctttttgtctgatttttaagttaataaatcattagcaatcttgtttttctccggcgaaaatactaaattagggcatcgcgaattttaaatgtaatgcctatgaaaaagtatgtagctgaactaatcggaactatggttcttgtactgctgggctgcggtagcgccgtatttgcaggaggagtggccgacacagtgggtgccggtgtaggaaccatcggagtggccatggcattcggtctttctgtcatcgccatggcatataccataggaaacatttccggctgccacatcaatccggccattacactgggtgtatggctgtcgggaggcatgaaaacgaaacgggcgttgatgtacatgctgtttcaggttgtgggcgccattatcggctcactgattcttacactattagtttcgaccggtgcacacggaggaccgacgatcacaggctccaacagctttgcgtctgatgccatggggcaggcgttcctggccgaagccgtgtttacctttatctttgtgctggtggcgctggctgccacggacgaaaagaaaggagctggcaacctggccggactggccatcggacttacgctgatactgattcacatcgtgtgtatcccgattacgggcacatccgtgaatccggcacgaagcatcggaccggccttaatggaaggcggacaggccatcgaacagctctggctctttatcgtggcacctttcgtgggagcagctttcagtgcgctggtgtggaaattccttcgtactgaataagtaaagacacgaggatagcatgtctttttcatttaaaaaacgtatctttgcagccgatttttaaataaggaaaaagatatgctatcacaaggtatttattcgattgttttactgattttctcgaacatcttcatgacgtttgcctggtacggccacttgaagatgcgtgaagagttcagctggtttgcttcactaccgctgattggggtgattgcgttcagctgggccattgctttttttgaatactgtctgcaggttccggctaaccgtctggggttcagagatagtgggggaccgtttgacatcatgcagctgaaagtgattcaggaagtgattacgctggccgtgtttaccattttctccatgattgcgttcaaaatggagttgaaatggaaccacctggctgcatttttctgcctgatattggctgtatatttcgtattcaagaagtgagataagacgcttgtcagttctgctgttcgcgtaggcgctggatttcacgctgtacgtcgtactggttgcttctgactttatcttttcggaagaattcttttcgccggatagagtcctcggctgctttctggcgaatgtattcatacaagtttcccgcatcctccgcctgcgctggttgcgggtttttctttttctcctcttttacggtatcgggccgaatctccgcttgtttttttacggagtcaggagcggcgtaaatgggcaggagaggagcttccgaaaaagccggctgaaaggtaagcaatgtctgcgtgctgtcggctgcctgctgtttacggagctgacggtagaagttgggcacttttaagctgtcggcagccgtgggctgatagtcagcataccttttccaggcattggcatgcttgcggttgtgtgccagcatgcgcccgcggcgggtcatgttgtcatagatgaagcccatgaaatcgagtccgccgataccgatacctacacctgcagagcctcccacactttcatacatccgtccggtggaaggcttgatgctgcgtccgtattcttcgtcggcatatacgcggttgggattcagtgtccaggagatttcccactgcttgggccgaccggctaccaatacatcgtatacaggatcttctccgaaacgggtccagatggtgtaaggctccatgcggacataactttccggtttccacactttggtggtatcaatcaggctgcggggcactttcaaatccactttgaagtccatccactttttgttcagcggggcttccaatggtttgttttcctgtttgggtaggggattaaagtcaaattgaatcatttttactgcatccatgttgagttgcagttctttttcctgctgctggctcatggcgggcaggatgccgactgtacatagaatcagtgtcagccgggatgataaatgtaaagagtagttcatgccgtgtacgtgtttatagtccttttactcgtcctccctgcatccagcacttgcgatagtaaggttcttccagccggctgacaatgacgccggaactggtgctggcatgcacgaattttccgtctttcaggtaaatgcctacgtgattggcaacgcgtttacgccgtccgttatggaagaacaccaggtcaccttcctgcaactggcgcttggatatttttcggcaattttccgtccgctgggcatcagaactgcgttgcagtttcttgtggtacacttttttatagacagctgaagtgaagcctgaacagtctgttccccggtgagtggctcccccatggcggtagggcactccaatccagtcggccacttccacgtagagacgatgattgtcgccggcatcaatatccatttccagccgcacagcggcacgtgccagttcgcggtagtccacgcgcggagcacgtgtgccacatgaagaaagtatgagacagagcccgaataatatatatgtcgaaaaacgagtgatgcagtatttgtacatgattgcttattttgaacaaatgtacgtaatatccttgttacatggataggtacttagggtattttagaacctgttgaagattgtttcattttgctttttcctgtatcttacataaaaaaacagcgcctcttccgaaaacgggaaagacgctgcctttacaaattgattatttatggtatattatttctgtaccggagagctcatgctgacttccacttcgttcttctgtccgaagaaggtcttggcaaaagctttcaggtcgtcaccgctgatagcgttcacggcttcttcgtatccggtattcatatccagattttcccagtagtaagtgttcaggatattcatccagtaaccgttttctttctggttctgcttgtaagtcttcagcatgtattccttcaccttgctcaggtcttcgctaaccggacctttttcgatgaattcctgaataccttcgttaatcagtttcaccatttcttcacgacggttcgggtcagtatcgaagtatacctggaaggcacctttctctgtcggatacttgctcaggcttccgttacagcttacgccgtatgtaccaccggcatcttcacgtacggtacgcaggtaaaccatgttcagcaactgaccaagcatgctcatctgcaggttgttcttcaaattatacttgcagtcgccagaatataccatcagcacagtagccttcggggtttccagttccttcacgaagttgttttcaaagtgtcctttgcggatggccatgcctgtatcgcggaatttttcgtttcgcttggtagcaggcagtgcacccaggtactgctcgataagcggagtagctgtttttgtatctacgttacctaccagaatgaaggtaaagtcgctggcatccgcaaaacggttcttgtagaattccatcactttgttgtagtcaatcttatcgagcatgtcggctttcatagacaacgcacgcggatgacggttgtaaagtgctacgttgatagaatcgctgaaagcagtcatcgggtcagcttcctggttagccagagcagccttgttacgtgtgatgaaagaagtgaaggcttcctggtccatacgcggtgcagtgaagcgcaggtaagtcagctgaagcatggtttccaagtctttcggagagcagcttcctgacaatccttctgaataggtgttaaccattgcgctggctgatgccatctttccggccaaaactttatccaggtctacagaattgaaattgcccagtccacccaatgaagcaatctggctaatcagagcgaactgcaatacatctttatcgttgaacaaagaagttccacccggactgaaggcctgcatacgtacttcgtcggccttgaaatctgtcggtttcagaatgacacgcacaccgttgctcagtgtcaggatagtagaaccgaacacaccctgttctgtcttcactacctttccagcatgtggtttttccttcatcagcggttcatcggataccttgtctacataagctgtcagcttttcagcttttactttgtcgattacggctttcagttcggcttccgtcggatatttcataccgtctttttccggacagaacacgctcaacacgatgtttttctctgtgatgagctgtttcattacctgattgacagcatctaccggaatgttcggcacaatctggttcatgatggcatattcattttcaatgcccggaatcggttcattgtcaatgaagtgacgcacatattcatttacataacttgcattacgctgcttgttacgttcattgtaggctgattccagtccgcgcaggtaatcagcttttgcacgggcatactcgctagctgtgaaaccaaactgacgcacgcgttcaatttcgcgcatcaacgtttctgtggtcaggatgatgccgtcttccttggctgcagcaaaggccgcaaatgctccttttgtcttagccaccaggtaatctccatcctgtacaccagcttcaatgaacggcgggttagcctgctgggtcagctcgttcaaacggctgttaagcatgctttcgatagaagaaaccatgtagttcattaccagataacccatgttgttcttctgatcgttaggcactacatcgtgtttgtggaacagatatacgatgggcacctgctgttccttgtcttttgccacggcaatgataggttcatcattgtcgggcacagggaaatatttacgttctgcagcgttggccggcatttcaatcggagagaacagcttcttgatttttacttcaatgctatccacattgatgtcgcccactaccacgataccctgctggtctggacggtaccatttttcataatagtctctcaatgcctgataagggaagttgtctaccacttccatcgttccgataggcagacgataggcatacttgctgtctttatacatggaagggaataccttttcatacatacgcatcatagctcctgtgcgtgtacgccattcttcgtggataactccacgctccttgtcgatttctttcggagcaagtgtcaggtcgttggcccagtcgtgcaaaatcaacagacaagagtctacgattccgtcacggataaccggtacgttagaaatattatacacggtttcatctactgaagtataagcgttcaggttagctccaaacttcacaccgatggtttcgaggtattcacgaagcaggttgtcggggaagtgagtggttccgttgaaacacatgtgctccaggaagtgtgccagaccacgctggttgtcttcttccaggatagaacccactttctgtgcaatgtagaagtcggcctgattgtcgggcaactcgttgtgacggatgtagtaggtcaatccgttttctaacttaccgatacgcacgttgggatcggtcggaatgggcggcatctgttgggcgaatgcagtcatcgcacctcccactaaaattaccgccgcaaaagttctttttaatttaaaaactttcatcgtaatttttatttaggttgtgagtaatcaaagaagtccgttggccgacaaataacgctctgcctcaatggctgccttacatccgcttccggctgccgtaatagcctgacggtaatgtgggtcagctacgtcgcctgcagcaaatacgcccggaacacctgtacacggagtattgccttcagtaatgatataaccggtttcatcggttttcacccacggcttgaaaatatcagaattcggtttgtgaccgatggccaggaagaatccgtcaatagccacatcgtagcgttcttcgtcggcttcacccatacgtttcactacgtgcatgccttccacaccgttatcgccaaacaaacctacagcattgtgttcaaacaatacggtaatgtgcggatgattcagtacacgctcctgcatgattttagaagcacgaaggaacggcttacgtaccacaagatataccttgctggccagtcctgccaggtacacagcttcttcgcaggcagtatcgccaccacctactacagctacggttttcttacgatagaaaaagccgtcgcaagtagcgcaagcactaacacccatacccgcgtatttcttttcgtcttccaatcctaagtatttggcagtagcaccggtagaaataatcacggtatcggcggtgatttccttttcatcgtctaccacaaatgtataaggagccttgctcagatcagcttttgtcacaattccgttgcgaatatcggcgccgaaacgttcagcctgtcttttcaggtcgtccatcagcaccgggccggttacgccttccggatagccgggaaagttttctacttcggtagtcgtagtaagctgaccgccaggttggattccttcataaagtacgggagaaagattggcacggctggtataaatggcagccgtatatcctgcggggcctgatccgatgatcaggcattttacatgttctgttgccataaatttggaatatagtttgtcttaatttgaataattctagaacaaaagtatatattttttagaatactccttttatttattcagagattttacggaaatatgcattctttattcattcttattcgccctttgaagggggatttttattgcataaatgaaaaatagatgctaactttgcccgtcaattagataaaactaacatttaataaagatatgtttagaagtcatacttgcggtgagttacgactcgccgatgcaggcaagaacgtgacactggccggatgggtgcagcgtgcacgtaagatgggaggaatgacatttgtggacctccgcgaccgctacggtattacgcagttggtgttcaacacggaagtgaacgccgaactttgtgagcgtgccaaccacctgggacgtgaattcgtgattcaggtgaaaggaacggtaagcgaacgttccagcaaaaatgccaatatcccgacaggagaaattgaaatcatcgtatcggaactgaatattctgaattcagcccagacaccgcctttcactattgaagataatacggacgggggagatgaccttcgtatgaaataccgttatctggacttgcgccgtagcgctgtacgcaagaacctagaactccgccaccgcatgacgatggaagtacgccgttatttggatagcaagggcttcctggaagtggaaactccgatgctgattggttctactccggaaggtgcacgcgacttcgtggttccttcacgtatgaatccgggacagttctacgcattgcctcagtctccgcagactttaaagcagttgctgatggtttccggcttcgaccgttacttccagattgtaaaatgtttccgcgatgaagaccttcgtgcagaccgtcagcctgagtttacacagattgactgcgagatgagcttcgtagaacaggaagacatcatcaatacttttgaaggtatggccaagcatttgttcaaggaacttcgcggagtggaacttacagaaccgttcttacgtatgccgtgggcagatgccatgaagtattacggaagtgacaaaccggatttgcgtttcggcatgaagttcgtcgaactgatggacgtgctgaaaggctacggtttctctgttttcgacaatgcagcttatatcggtggtatctgtgcagaaggtgcagctcactacactcgcaagcagctggatcagttgacagagttcgtaaaacgtccgcagattggtgctaaaggtatggtatatgcacgtattgaagcagacggcaccgtgaagtcaagcgtagacaagttctacagccaggaagtgctgcagaagatgaaagaagcattcggtgctaaaccgggtgacttgattctgattctgagtggtgacgatgccatgaagactcgtaagcaactttgcgaattgcgtctggaaatgggtaaccagctgggcttgcgcgataagaacaagtttgcttgcctgtgggtagtagacttcccgatgttcgaatggagcgaagaagaaggccgcttgatggctatgcaccatccgttcactcacccgaaagacgaggatattcctttgctggataccgatccggctgccgttcgtgccgatgcatacgatatggttatcaacggtgtggaagtaggtggtggttctatccgtatccacgattcagcattgcaggctaagatgttcgaaattcttggattcactccagagaaagcacaggaacagttcggcttcctgatgaatgccttcaagtttggtgcacctcctcacggtggtctggcatacggacttgaccgttgggtatctctgtttgccggtctggattctatccgcgactgcatcgccttcccgaagaacaactctggacgtgacgtgatgctggatgctcctggcttcctcgaccaaaaacagttggatgaactgaatctgaaaattgacatcaaggaaaataattaataacgtttcaaggaaaaagacaagaaagtaaccggatgaaggaatcggtacggattatacgctttgcaataataggaacgctcaatgctctgattgcagctttcgtagtatggctgttgatgcacatcgagggcgagagttatattatagctaatatatgcgcatatattgtggcacagatacataactttatctggtgcaaatactggatttttccgcttgaaacagatgacaaaaaaaatagcatctggcatcagatgctattttttattggtgctttcgcactggcttatagtgcgcagttcctttttcttcttatgctcgtagagcttcttcactgcaatgaatacctggcacaattcctcggactctttatctacggtgccgtcaacttcatttgcaatcgccgcctgactttccgttaggccattttcatcagattttcttcttcaatatactgaagtttcttttccagtatcacttcacgcgttttctccgtattgtcggtacggaacaccagtataccttttcctcccagcaagaaggaatagagataggaaatacctatgcctgtttcgctgaagctgcggatggcatcggcagcccgtcccggttcattgtccaaactgatggcaaacacatcggatacattggctgagatacccgcatccttcaatacttcataggcacgcaacggctcggaacagataatacggtagatgccgtactctacagtatcagatatagtagaagcaatcaactggatatgcgcttctttcagtagttcaagcacctgaagcagtgtgcccgacttattttctacaaaaacagatagttgatgtatggtcatactcttttatttttaaatcaatgtttttcgtaaatctttcacgcgcacggcttttccttcctgtacgggcaggcttcctttaggtaccagtttcacgcgtggggtaatcagaatttcatctttcaactggcgggtaatttccttggtcaggttctgaaggaatccgtagtcatcggtaaagtcattcaattctacctccaccgtcatctcatcgttcgcatcaaggttggtcagcgtaatgaggtactcattacccagttccttgaactgcaacaagatgttctcaatctgaatcgggaagatattgacacccttgagaatcatcatgtcgtcactgcggcctttcattcggtcaagacgcttgtgatgacgtccgcaaggacaatcgcccggaagtatacgggtcaggtcacgcgtacggtaacgcagcaacggcattgcttcacggttaatggtggtcagcaccagttcgcccacttcgccttcgggtaccggttccagtgtgacagggtccacaatttctacgatataataatcctcccaaatgtggagtccgttctgttccatgcattcaaaagctacccccgggccacacatttccgacataccgaaagagttataggcttttacgcccagcatctgttcaatacggcgacgctgttcgtcagaatgcggttcagctccgataatcaaagtcttcagatgggtatcgcggcgcgggtcaatgtgcatctcttccatcacttcatacaaacggccggcataactcgggatggcatgaagagcagtagtaccaaagtcagtgataaacttaatctgccgcttggtattgccagcagcagctgggacagtcagcatacccagacgttcggcaccatactggaaacccaagccaccggtaaacataccgtagccagaagagttttggaagatatctcctttacgcagtcccaccatatacagacagcgtgctacggcattggcccattcttccaaatcgtgctgtgtatgcaaaatcacggtaggagttcctgtggtaccactggaagaatggagacggactacctcttccaaaggcacggcagaaagcccgaacggataatggtcgcgcaaatcctgtttggtagtgaaagggattttctgtaaatcctccagtgactgtatatcttccggtttgatgccgcattgctgaaagcgttccttgtagaacggagaatgcatacaacggtcgatggttgctttcaaccgtttcaactgaagtttctcaatgtccggtctcgacaaggtttccacttcaggatgcaagtacatttggtcgtttttcatattatttttcgttgtttgatgcacaaatatagaaataataaactaaaaccaaataaaaactttcatttttcttttaatactgttcaaatgattcaaaatttgtcaggatagttactgtatatgtatcctccctaagcggaaaaacagggaatgccatttcctgtcctatatgaaaagagccactgcaaatccctcttttacgaagaaatgcagtggctcttcttattttctatgtcaagccaacgtgactttaaaggccttattcaaagctcccgtaacgtgtaggcagcaacttacggtcgcccaatgtattatcaatacgtgctacgttaatccagaatttgttgtctcttacactctgaatcggataagccgccttggcacgtccataaggatgagtccaagcatctcccacaatctcgtattccggatgaggagcattcaccaatacgttgtcttctttgtcgacctttccagtctcaatctctgcaatttcttcacggatatgtaccatgacatccacaaagttgtccaattctgccagactttcactttccgtcggttcaatcatcagcgtaccgtgtacagggaaagagagggtaggtgcatggtaaccgtagtccatcagacgcttggaaatatcattttccgagattccgctttcttcgtgtatcttccggcattccaaaatcatttcatgacctacgaaaccattctttccgcggtataccactccatacgcatctttcaagcaagcagccaggtagttggcattcaggatagctgtttgagtcgctctcctcaagccttctgctcccatcatgcaaatgtatccgtaagtaatcggcaggataccggcacttccgtaaggagcagcagatacttcattctgcggattgcccgtgctgacatggcccggaaggaaaggaaccagatgctcggccacacaaatcggacctacacccggaccgccaccaccgtgagggctcgcgaatgtcttatgcaggttcaggtgacacacgtctgctccgatagtacccggattggtcagtcccacctgtccattcatgttggctccgtccatataaacctgtgcaccgcacgcatggataatctcacatatctccttgatttcctcttcaaagataccgtgagtagacggataagtaatcatcaaagctgccagttcatccttatgtgcttcagccttcgcacgcaaatcttccaaatccacatttccattctcatcgcaagcacacgtcagcggttcgtaacccgcctgtacagccgaagccggattggtgccatgtgccgaagccggaatcaataccaatcggcggttaccctgtccgatgctttcctggtaacttctaatcacgcgcaagcccgtatattcacctgctgcaccggaattcggctggagagatacgcctgcaaagcctgtaatcgtcttcagctgttccgacagattgtgaatcaaagtctggtatcccgcggcttggtcttccggaaccaacgggtgaaggttcatccaggccgcattgctaagaggcagcatttcggatgccgcattcaatttcatggtacaagaacccaaagaaatcatggaatgagccaacgagatatccttccgttccagacgtttgatgtaacgcatcatttccgtttcggtgtgatacttctggaagacttcgtgagtgaggtatgtgctcagacgctggaactgtgcggcaacaggagcttttcccggtatagcacagacatcatgcatcggttcttctgccgctacggcaaacagattcagaatcagcgtagcatctgcctgcgtagtagtttcatcgacactgatacccacatcaccattatcaaaatagcgcaggttgatttccttgctcaaggcaatggtgcgcacttcctgaatggtcacgttgttcggtaactgtattctcagtgtatcaaagaaattttcgttctgcaatttatatcccagtttcgtgagctgttctgccagccagaaagccacggcatgcacatgattggctatttcctttatgccgtcaggtccgtgatatacggcatagaatccggccatggtagccagcagtgcttgtgccgtacagatattggaagtcgccttttcacgcttgatatgctgctcgcgagtctgcaaggccatgcggtaacacagatgaccgtatttgtcttttgacagaccaattatacgtcccggcatatttcgtttgtattcatcacgtgtagcgaaataagcagcagaaggtcctccatagaacatcggtgtgcccagacgctgtgagctaccgaaagcaatgtcagctccccattcaccaggaggaaccagcagggcaagcgacaggatatcggctgctacggccaccttgcatcctacggcatgtgcctgctcggtaaattcccgataatcttctatgcttccgctgttattcggatactgcacgatgcaaccgaaaatatccagcgtaaaagtcaggtccttgtaactgcctacctttactaccattccctgcggaatggcccgggtacgaataactgccagcgtctgagggaatatttcttcatctacaaacagcacgttggcctgcgctttctgttgtgcacggcttctcagcccgtacatcatcgtagctgcttccgccgcagccgtcgcttcatccagcagagaacagttggccagcggaagggcagtcagatcgctgattaccgtctgaaagttcagcaacgcttccagtcgtccctgggaaatttcagcctgatagggcgtataggaagtgtaccaaaccggattttcaaacacgttacgctgaacaactgccggagtcaccgtgtcataccacccacatccgatatacgtcttatatagcttgttctgggctgccagttcgccgatgtgctcggcaaattcacgttctgtcatggcagctcccagtttcaaaggttcttttaacaggatattggcaggaatggttttctctatcagttcatccagactgcttactccaatttttttcagcatcagcggaagttcctcttccccgatgccgatgtgtctgtttgcgaatgtcgttgttttcatgattattaaggtaagatttatggttttcaagcaaaagaataacgcatcagcggaagaaaggattgttcatcttttcatagccgatggtagtggggtttccatgacccggatataccattgtctcgtcagggagtgtcagcaaacgtgccacgatactttccctcaactggtcaaagtttccaccttccaggtctgcacgcccgatgctgccccggaacaatacatcaccgctgaacatgcagtgctgcgcttcacaatagaacaccatgcttccgggagaatggccgggcacggcaagtgccttcagttctatatttcctatttttatcagatcgccgtcatgcacgtagccgcccagtgcaggaggttcctcgttcagagggaagccgaacatgcggcaatactctgccgttctcggcaacagaaattcatcttcctttccggcttcagcactgactccaaattctctgagcataaacgcattgccgaaaatatggtccagatgcaaatgcgtattcagcaaatgtgtcaccgtaagtccgttttctgcaatgaacttcttcagcatctgctgctcttcctgataataacatccggcatcaattacagctgcctgcaacgtttcctcgtcccacaccacatagcagttgaccggaaacatattgaattcaaatgtctttattttcatatcgattatccgttgattgtgacataaaccactttcttggtctcaaaaaattcctcttcaaaataatccttcaaatcatacataagtgtctgatgctttacaggcatgacttcccgttccagctcaccgcccttcaggcagatcagtccgttgggaagggcattgtgctgttccttcttgatattcttgcggatgattttcagcaagtcagccagcggcatgacggccctgcttaccacgaagtcgaacaattgcttttcttcctccgcacggcaatgacgggtagtgacgttcttcaagccgatggcattggctatttcagtagccaccttcactttcttgccgatactgtctaccagatggaaatgtgtttccggaaagagaatagccagcggaattccagggaaaccaccgccggtacccaaatccatcacagtcgtttccggacggaactgcatgaccttggcaatgcccagtgaatgcagcacatgatgctcatacaggttggtaatgtcttttcgcgaaatcacgttgattttgctgttccagtcggtatataggtcatacaaagctgcaaattgctgttgctgaacctcgctcaggttcgggaaatattttaagataatgtccatgtacgattatttcttgattaaataagtattgatttcttcatagggaaccgtcagttggaagcgtcccatgtaataaggtgcaatgtcgtaggtgttataaaggaatgtcactccttctttttcgagcaggaagttgtcgggcacatacaagtccgtgtccaacaagatacctaccgcctgaagtccctctacacaggtcagcgtatctgtctccagctttttattggcttctgccagtagcttgtccagaatcagccggcagatatcctcttcagctcctttggcaaacacttcgctcttgtccagctttttcccattggccgcatcaatgttaacccactgtgcccatgtgttgggatgtgcgcctccggtatattggaaagtagtgacggcataattccatatactgtctttaccttcttgcagttccgaatttatctcatattcgtagttataccagttaggaatttcatcgggcttcattccgttcttcaagtcggtctgataacttccctgcacatccttcaggtaatcacctgccaggctttctttgatagacgagacaaaggcctgtggagaagctgctccggcatgtgcacttgaaaaagcatcctccagcacctgattgattacctgcgtcagcgaatcgttcttattggccgactttaaatatttaaaattgatttttatctggcatttaggtgattccgtattggcttcatccagatacacagtcgtatccataggaatgaaatccactgaaacttcgtttcctccggctgtcccgtttccgatacaccccggtagcatcatggtggaaaacaagccacacacgacagaggggaataagcctctttgtatttttttcatcatgttcagacgtttttctcaaaaaaatgatttctctgtctacaaatatagcataacttcccgaattgcgatgtaaaaaggaattctttttgtaaatctttgccattcacaccaaaaaattttttctttgcaaaatgtaaccttttaagaattgaatgccatgattacaatagaaaactggggactcatctcttattctgaagcttgggaacgacaaactgctctcttcgatgaactcattgatgccaagctgaacggaaaaccttataccaaccggattattttctgtcagcatccgcatgtctacaccctgggaaagcacggaaaggcagccaatatgctgttgaaccccacacagttacagaccattcatgccgaattgtttcaggtagacaggggaggagacattacctatcacggaccaggacaatgggtgtgttatccaattctgaacctggaagattttcacttgggtttgaaggaatacctgcacctgttagaagaagcggtgattcgtgtgtgccggacctacggcatagaagccgccagagtgcacagggctactggcgtctggctggctacgggtacgcccgaagaacgtaaaatctgtgccatgggggtaagaagcagccatttcgttacgatgcacggtcttgccctgaatgtcaatacagatttaaggtatttcagttacattcatccctgtgggtttatagacaagggagtcacttcactacaggctgagttacagcaagaagtcccgatggatgaagtgagagacagactggagcaactgattctggaattattaaaagaaacggcctgacatattcgtcaagccgttttctttttccttattgccgactggcaaaataagcttttatctgttcgttgatttgctgcataccttttatggaaggatgccctccctgcttgtcgattcctttcagttcgatgcaaggcacgtgatagtatgcacagatagtctttacagactcattgatttccggtttcaggtcgcagttcaacagaaaataaatctccacgttgggataacggtactgcatgtgttccagcatataagccatggccggacggaaactgtacaaatcttttttcgtccagttttcatactggtattcaccgatgggagccccggcccagctgtcgttcgttgctccaaaaatgaaaatgaggtccggacaccccaggttgttcattcgtgtcacaaacgagcggtcggaataatcctctttccggtaaccggtgtggcagatagttgcacccgagaaagaattgtttacgcacagacggtatccgctttccttaataaacttataccaccaggtctggtctacagaacggacatcgttgtttttccgcggctgctgaaagtaccacacggcattggtatcaggctgaaggtaattctcgaaagtagagtacgaatctcctaaaatagaaacagccttccgggtctgcgaaaatcccatggtgcagaccaaaaggaaggaaaatagcattacatacgtttttttcatgatgtgtcatttaaagtttttacaaatgtacgcgataaaaaacaaaacaaacagaaaaaagtgatacaaaagtgaggcattttgtcggtatacaagtaattggggtatgattatccgtaatatgtatatcgtgttttccgaaaaatcaggatatttttgtaaaataaaaattgtattacccattcaaaacatagcacatggaactaaatgattttttgatgcacgtagccatgcgaaaaccgcttgacacacccgaaattatggaattgcttaaccgcatgagtgacgaagcccgccgcattacattcgaactgaacggatcgtatcacaccatggaagaaatccgggcactgatgtcccggctttttggtcggccagtagacgacactttccgggtatttcctcctttttatactgattttgggaaaaatatccatataggaaaagatgtgtttatcaatgcctgctgccatttccaggaccagggtggagtgacattgggcgacggttgcctgattgggcacaacgtggttttcgccacacttaatcacgacatgaatccggaaaagcgtgcggccatgacaccggctcccatcgtactgggaaaacgcgtatgggtaggctctaacagcaccattctgcagggagttaccattggtgacaacgccatcattgcagccggagccgtcgtaacgaaagacgtgccggccaataccgtagtgggaggtgtgccgaccaaattcatacggaacatagaataatccgctttcttgatagagtgatgtaaaaaggcaaagaagattatttgcaatccttttttcaccttttatgtttcccgatgcagaaacgtatgttttccttgcgtaaaccgtatgtttctgcgcaggaaaacgtacggtttgcatagcaaaaacataaaaaatcgcctgcctctttgccaatgagacaggcgacttttatcatatatattttaatgttcaggcaaccagccagatgtatcccagcggaatcagaatacccgctaaaagtaaccactttccgcgtcctgccagtccattttttcccttgaccatgaacaatccggatacggcaaagaataccagcgaaatggcgaaaaagtcgcccatgagattccatccctgaatgcggttgtaatgcaaccggttgaaccagtacaccaccggacgtttttcatgtacttcataatctacacaaccgctggctgcgtcatacacacccacgccgccttccagcatcaggcgatgatggctttcatcaatagacagcacccgctttacaggaggcaaatcttcctgtcggttccatgccgcaaggagttcttcggcctgcatgcctttctccagttgaacggccgcttccgtggtacggaaagccggatccttgccattcatgtggttcagcaggatgcccgacacggcataaatcaggcaggctcctaccatcaggtagcccaggtcacggtgcagcacacgaagccagtaggagaggctcttattccgccacttcatattccgtgccgtctatgtagtaaatggaataatagtccttgttattggccttcatccattcacgcatgctctgaatgttgttcatctccgcatcgcaggtttcgccgttgccttctgcttttccctgcttttccttcaattcttcttccgcctggtcaatgtattccttggtcagacggttctcgcgaagaatccctttgatgatgacctctgaaccaatcagctcacggttgaatccgccgatattgccttttgcctccacacgtacggaagtcttctggtcttttcccattacaaagcaacggcgtccggaatgcttgcaggtatgtgtgatgaatcctttcagcaccacctccttatctacattcttttctgcatccttcaaaatgtcttccacatattttgcctcactggccgacagagcggcagtaggctgttcctgagaggtctctgattttttgttattgttcacacacgaggtagccgtcagcagacaggccgcagctacgataaaaaacagttttttcattttcaattgaatttatagttattcatatttattccaaggaagaaataacagtgctactatcccggataagccggcagcgcacacgcatagcgccatcagtatccgtctgtacaaagataccttgtttctgcacaaaaagaaagtcaggagggctaaaaagaagctcaccgctaatccctttgaagaaagattacccgcatagagattcacaaaggaactcgtttcggaagaaggtgacaaacggaacgggaacagccattccgacaactcatcccacaaaacgcgcttccggtcctgatgataggaagagagtgactgaagcgtcacggcatccagtccgtagcagtccattccttccgcatccgatacgcgtacggtccagtaaagcaggtttcccagaatgctgatttcgtctttcgtgatgtctatcggacggatatcgaacggcaggaagcgataaccgccttcatccgtgctttccagtaagcccatttcacctttctcgccaaacagatagccatagaaacgcttgtcgctcgtctcactcatgacaaaccatttgatgcccagctgcgaaccgatacccgtatctttcacgaaaggccgtccgttcaccatcttcaggtggaagagagcccctttgctgtccagacagaaatagccctcctcatagggctttctcactgtagggtttccccaataagcttttaccggaaagctaaaccctttcttgataagctctttggtgaagatttcactcttctgccgatttaccgaattggactgcgcatcgacaaaagtcagttcacggtccatccggaagtagtcgccgggaagcgtaagatttccccgtttgggcatggcttccagcaacacccccatagcgggttgcggagagaatacatcgaccggacgaaaacggaacatcacttgtttgctccgcaggattttcacgtcgatggcctgtccctccagcgaatcgggcaactggccttccatggccagctggcgataattcagcagcggaagcagtgaatcgtattgcgcacgaggatactcgttgccatgaatatcataaaatgaattcttatgctcgcgaaagtcaatcacgcaaagttccttcaaccgggcactataatacatcagcggataactgtgcgaatcgtcggtcattttctgtaccagtgccggcaccgtccaggaagccaacagggtgacagacaccagaatgattgaaaaaatgagagatttatatttcattgttcattgtttttattgtacaccatacttgaaccgaatgcaggatgagaaaggaaagataaaagaagctgccagtatccagccgattcctgccccgaactgtgaataggctccgggataggaggaaacaaacagcatggacagcagtcccaccgataccacaatgcatagcatccgctgtttccactggggctcgatacaaacccacgcagtgaagccatagcctgccactgctgccactatccagggaagcaactgctggagcatcattcctacaacctcggaaggcagaaacaaacgaaccacagccgccaggaccagcgaaagcagcagacaaagcagcaagacgacactgaaaccataccacagcatggaggccataatttgtgtttctcctgccggaagatggagtgtcagcttcagccgtttctgcgtcatttcgggcacatactgcacgactcccaatgcaattccggccagtggcagcaggtacatcatccacggggcaaccgatgtgccctgaaaaagacagccataccacacattaactgcttcattcaaacggatttcatgggtaaggtcgatgtaggtataacccacggctactgccatcagcaacagcatcaccccaatcaggcggcgggttttcatccattctttataagacaaggctctgaataaattcatgacattaatatttacctgttaaaccaataaatgcatcttccagcgaaagattctcctctgtaatttccgtgacacccatcgccttcaaccgttgttcgacttcggcctttggcagaaacgaatatacttcccatttatcgcccaatgcagagggataccagaagtcttcatcgccctccagcttaaatgtatctcccggacgggtgaaacggtatcgcttgaaatggtgcatgatttcctttaccggcttatgcaacagcaagcggccatagtccatgatcatacaatcatctatcagcaattccatgtcctgaatgatgtgcgaagtgagaaagactgtcttgttctctgccgacgcatattcccgaaggtattccacaaacagacggcgatagcccgggtctagtcccatggaaaaatcatccagaatcagcagttccgggtcctgggcaaaaagcagtcccaacgctacctgcgaacgctgtccgcacgacatggtagagagtttctgtgaaggaagtacctgcaactttttcagcaattcataataggcctctttcttccatttcgggaagaagaccgaataaaatttctctatctgcgaaaccgtaaaataggcatgttgcacatggccttccagcaacagtcccaccttcgatttggtaagcggagagaggtgttccatctcctcaccaaacagcctgcacacgcccgaacgaggcttcaggtaaccgttgaggatattgatgatggtggttttccctgtgccgttctttcccaacaggcccaatacctttccctgctccacgtcgaaactgagattttcgtaaatcaagcggtttccgtaataatgcgtaatattttcacactctattattttactcattgtagcacgattaaatgattagttcttaaaattttacccctaccttgatgacgggttgcacgaaatcctttcccgccattgtagtcgtaaaagccctggcatacatcacctcgcaccggacataaccagacagagcagaagtaatttctctttcataccccacggccgcatatggcaccagccgaacagctgtctgataatcgtattcttccaccagcaagtctgctctttctgccggacgttgctgatcctccgatacactggcatattgtccgtcttctttcatacagccccatccgccctgcaagcccagtccggcggaagcagtccatacctgccggcctttataccagtttctggccccctgaagccatagccccatgacgtgcagactctgcttccggaagaacggatattgcgataccgtcacagaacgggaacgataatccagccgcactttggccgaccagtcagaacggctctctttacctcctgaaaggagttgatacgccaaccaggcacgcagctggtctctgctcatcacttcattgctaccataatagacaatctgcgatacgcccagtccgtccgtactctccttataagaattttccctgttttccagtgatttcaatgcgatgcccagttccatcgcctgaaaaagtcgggattgctgccaggtaagctttgcacggtaacccacctcattccctgtatgagtagagtaggtgatggaagtcgaagaaccgcttccaaagcgtccggaagtctttcggatgaatacctcctgaaaccagtgcaggtctccgcgatgatactgtccctgaaaggctacttcatgcgtttgggtaaacaagggagtcgtgttcgaagtatatccactttcaccaaacacttcactgcgcccgtagaaacctccaaaactgatgagagaagtgtattgacggtcggtcgttccatagatgccgaagcctaccgtttccacgttgcgcaaatacccgtaagaaagtccgacttgccacccggaaaaaagttcatacgagaaacccgtcgacaaatggaggttcatcagggaattctgatgccgcaagtccttgaacttggcgtagttttccgtacggtattccagttgccctccccatgaaaggcgaggagtgaggaggtagcctgcttctcctctgagcatgtaccattcatgccgtttcgtaccggctcccgagtcgtccatctccacaatgtcaaaaggcgtctcttccggatgcagaaaagccgaacccgacatgtgcttgcctttttccgtgccgtatgccatggcacctcctaataccagccgcgagttcagccgccagtaggattcgattgagaccaatccgcccaaccggctgtccgactgatcataattcacctgttttccgcttccgtaactgccttccgcctgaagataagagatgcgtccgcactccatccccgacagaaaagaaggattgcttccggcagaagccgcatacctccacaaggtttcctgaaagtccgtacgaagaggagaggaggtccctgagggaacacttccccaggacctgcctcccgccacaagtacaagaaaaaagcaagcgatacaataatgcttcatgtttagtttctcaaagaagatttgctccgctgatggaagtcagctgtcgaattgtttgtatcctgaaaaataattctggctccgtttttcaaggatgcctcggcatctattccgctggcatcggttgaatttcctacaccgagcgaatagttatagaccagctttccttcattctccgcaagtgcttccgtagcctctttatccacgttgcgatacaaggtatatcccatgccgcgggtaagttccacatagcctgcatctaccgagggaagaaggcgcttctggttgccgtcggctccctgcacgaatacttcgataccgtctactacccattctgccggcactttcttacgcggctgactggcacttcctccataaaggttggtggtggatgcatcgtctacaaaagcctgtagggtagtactttccggacggaacacaaagaatgccggtccgaactggctgacaggccatgcattacccaaaccatatttgtaagccttcaagtaatggtcggtagaaataagttcggaaggcgacggatagtatttggcattgttgaagtcctcaatgtcatacaggcagtaataagtacggttggccagatttacggactgagaataggtctgtgtgtggtcgatggctccattcagtgcaatcaccagttcttttccggcttccagctgtacctgcttgtcgaaataccagacagccgttccggccggtatccatccttctgccgcataaaagagttcaccgttcacatagtccttattcgaagcatgaggattgtaaggatttaccatacccagtgcaaagtcgctgatgtcgagtgtttccgaagaattgttatacagcacgacatactggtccatggcaaacgtacccgagccatcgtctttcggacagcctcctacatacagttccttaatcagcacggaacctcctaaagacatttccagtttgatggtagcctctaccgtttcctgagtcacattgaccgatgtattcaatccattgaaaagatacactttggcatcggccacccgtttgtcggaagccgaagcttcataaataccttgcggcacttcaaaaacagccactccttccgcattggtcgactgactgaaggtggtactgcccgacgtattcttcagggttacgctgactccctccactggttcaaatccgcttccctcgggatacaccagccgaatgcttacactgctcacctgataaccaccgttttctttctctttgcacgcgctgaaagccagtatcagaattaaggcgcagcacgcagataacatctttttcatcatactcatacgtgtttatagttttaatttaaatgatatgccatagttaaagggagtgaccagcgaagaagcaaacagacttccctcattacccgtctgccagttctttatcttctgcatgctgtagaagaaattattggcaaagaatgacaccgtcaggtacttcccgatttcttttgagacgttcaggttggccgagaaatagggagaatatccctgcttcctgaacatatagccggtggtgctttttaccaccagtttactgagttcgttatacaactccttgtcatgttcggcagcccacaggaacttttccatgaacggtatacgggtttccatatcttctctcgatacataatacagcggatacgtagccacgtaactggctccgttataaatatccgtctgggtagacgagggaagataatcactctgcgagtcgagcacatagctccgggttccaccgctgtattcgctcaggttctgccgcgtattcagaagagtaccctcaaaacgcagagagaaaatcattctgattttcggcacatgcgtcaccaatgtcagattggtattcagtcgctgtgtcatgaatccgttataattgacgttgccacctacataataaccgatgtatttataaggctgtccgtccgtatcggtcaggctgctggtagacggtaccgtcacttcgtcaatccctttgtagcgataatacttcccgtctatgcggatggaagtattgattgcttttatccggtcaaaatcaagcacccattccagtcccatccgtgaagaggaagaaccgttcacattcatgacagccgactggaaatcatgaatctctttataggcaagcgtttgagagggaagtatcccgtttttgtcggacacggtcacgactcctgtcgtacggtcaatgctatacaccctgtctgtcgaaggtatcaggcaattattgagcgcgctctggtcggtcagcttataatcaaacggagtatagatacgcgtactggtataaggctttgacagggtgttatagaagaacgacaacgaaatccgtacccccttcagacgaatgtccatacccgcttcccgcataatgctgtactgccattgtaactccggattatagacaggaagcacaggatgggtgtgataagcataataggttgttccgtcggccattgctccaggagcaaaagctaagcggtctacatacgtttcccggggatacagcatctcgaacgaaggaagtttcaccgcctttccccatccggcacgaagggtcgctccctgaaagaaaccatgctctttttcgccaaatgaatacttggcactgaaacggggagacagactggatacggtgccatacaccgtgcccgggataaaagtcatgtcacttcggagtcctcctttaaggagcagttgcgaatgacggaaaggcagggctatctcttcttctgtatacgcagccaaattgtgcatgaaaggcaattcatcgtaacggtattccctccaggtgggagcgaccgacatgtcttcataatacgttcccttacccaggttaccttctcctttcatatctgctcctgccagcaggttgctggttacgctcccgattttatggctccagcgcgctttcaggtaggcagtgtaatttatgggacggctgtcgttgaatgaggtcacgtaccaatagccggtgggcaataaaataataggtgaggagggatcctcttcatatttggaagccacaaaatatccttcttcggtagtatgcagtgcaggctggacggacgaagccgactgatttttcttttcttccacccggttgtcagcgtacgagaaggtcacccctccacgcaaattggacaaccagggcgagttcagcatatagttaaatgaaagactgctccataacgcattgtcccgactcttggtataagtttccttaaaggcatccgggtcggcctcggtattattgcctcccacattaccgttcagactgaaatcgacagacaaggtttttccggtctttgtatgcaggctgttagagtatctcacaccaaaggcattgcgtacatacgaggtgtagggtgatgcaatgtcggacacagagtgaacccgctcataggacaggttcagtacgcctacttttcctcccagttccactcctttacttacggcatacgactgggtggtaggacgcactgccacatcgacaatcagcggactttttcctttgcgtgtcacgatttttaccactccgttggtcaggtcaccatattctacagaaggtacaccggtgatgacttcaatccgttctacattgctgttgcctatgttacgggtatccgtcccggaagtagaagcggccgtagcattacccgacaggcgtaccccgtccatctcaactacggttccgaaatcgggattccccatttcagtgctttctcctcgcagcgtgattacctgagtggaagaagtcaaactcttgaacttgctggtctgttctccgggcaagagacttaacgcgtcagacacactgacactctgtaaatggtccagtgccgtacgacccagcgtatatgccgtagtagcatctatggctttcctttctgccgtaacagtcacctcattcagggccaacgtctgttcagaaagatataccacgatgttttccttatcttttctgacgtccagctgtaatttacattcagaatagcccagacaacgcaccagcacctcatgctttccttctgccagatgctgaatgacgaactttccttgcgaatcggtcatggtaccgataccacttccttcaatccacaaagtcgcaaactccaccggtactttcgacttggcatcgagcacggttcctgctaccttatacgactgcccccaggcagtcagactggcacttgcgaaaaaggctaaaacgattgttttcatatcctgatgatttcaggcgcaaaggtatccttattggcaagctgtgtcaatcgccaaaattaggtaataggagagaggctactcatcatatttaggtatttcaagtattactgactaataaacgataaaggaattggtaagtgcgaaagctacataattattgctctgcaatcaacggcaaacactctgagatacagcggtcatattctttggtcccttcatccagctgataataggggcgaatatcggtatgaacaaaacgctttgtcttgtattccttgcgtaccgcattgtctttacatttttcttcttcctcgggtgtcggtttgctataccctaaaagtaatttttccatgttccagcgattatgctccacctcggccatcagctcaatctgttcggatgtcaatcgcaaggggggtgttgtgccaaagcccagcgaacgaagtttcaaatctaccgaatcggcgcaatacaggtttgaccactggagggccacttgtaatttattccatccgtctaacaattcactctccgaagggcaggctgccggactggatttatacttatttttaaagtcataaatatagttgaccaattgtgcccgacgagtactgtgacggtccaagtcgaaacaattagtcagcataccgaacggatacacatgcgaataacggttcaacgattctttcttgatacggttgttaagcatatcgagcagcgcacttgaggtctcctgtcggataaagactgggatattctgatcataaattacatcaggcagataaagccccatagccatactttgtggcgggaagttcaggcagatggcgatagacagttcctgctgtgggtcctttgcccattgggctagcagctgctgtatttccggagtttcggcctgtcctttgataaactcaaactctatatccagaaagttcacctctttaccatatatctgattgggaagaatcgtatggactttctcaatctgttccatgttgcggtaatagcttaaggaaagatcaaagtaatgacgataacgccccctgaaaaaattcatttctttatcagcatctgcatcgatgaaagtaatccgacttttcagtcgtttgtcacgacagaaattaggaaagtgaagcaagtgtgctgcttctactcccagcgcaactcccatccggctcattccgatgatgacgaagtgaacgtaccggtcactttcccatgtaatcggttcacggtccagtgcaggatattccacttttgcattttcttccccatagtgtcttttcactaataactttttagcccactcttcatagaagttgaacgggtggaaatcaatttgcttacgccactcttcggccaaatccgaaacctggaaggcagcataagtagtttgatactcaaacaataccgatactgtaatacgcgggcaatttgatttcttacggtgaattgctactattttctgcaacgagtcaatgttaagcgaatcatggtcgtactcattcgactcaccaatcaggaaaatttcgcgggcactggtcgtatagagcttttccagttcctccgtagagtttcgttgtgcgtgcagaaccagtacacgtttctcctgctcagtgtcgagcacggtatggatgcggtttcgtacttcagagcttggttgcacgctttgaatcaatatgtagcaatcctcgtattgagggtcggtacatatttgcagaacaagcatcggaaccatttcgtcgaaaccgataattacaacatgcttttcaagaggataagaaatattaccttcgcgataacgttctacatgacgttccagcatgtttgacaccacagaaatcaataatccagtaaaaagcaacaatcccataatggccacaatcagcgagaaccagcgtaattctgccggtacattggccacgctacccggatcgataaaaaggcaaatcagttgtagcaggcgtcccatcgggacttcagtgccggagttcgatgaaggagtgtccgtaggttccggaaaggaaaagaaccagctaatcagataaatgaagccgaaaaaaagcaacagcacacccgctaaccaggcaaactgtgtacgtccgtggcctgagaaagtccggtcaaaacggagtgtgaaaaaacgaatcagcgagttcataggcgatactttacggggagattgaaattatttgccttctttaattttcttgatttctttttccagttcagctattttaagatctttacgctttatctcaatcttgagattctgcaactcgtcattggtctgttcatttaagattagttcctcgcgacgaacggattcccgatagagtgacagctcggtgtcaaaaatctgcttgcgactgtccgtatagattttcagcagttgtctgccatagtagcccgtccagcatatagcgcacaaaccaacaatagtcattgtcacaagaataggccatgaatcatattcaaaatagggtgagaaagctaatacaacaatgactaaggctgctattgcgagagttcctcccattgtccaacagaacccgcgataaatgcgcttgattcgtgcaatgacggctgaatcaattgaccttatagaatacttgctgattttaaatccgagtttaagaatgagtttaagggtctggatagcggtattccggtcgtattcacgttcagtttcgggcagctcctcgtatgctaccagacaaggatgtttcttctgctgatcatcgcgttgctcaccgtaactccagccttcatcaatgcgcccttttgcccatacttcgtgtacgttacgggccatttgttcagtcagttcatttaatgcttcaggaagtacgatatgctctgtatcgagaggattagggatatatgttttcatattaatagatattaattgtttatactatatttcttactcaaaattcagctaaataactttttagctcacatacaaaaataaaaataaaatatgaatcttttagttgatatatctacaaatttgtcttcttgtatatcattttccatcttttgtaaaaaacaagcagtcgcctgtctctttataataaggcagacgaccacttaaagagcaaccgttttccacatcctggtcaacccataccctaccttgttaacagactttactcaaaataaccaccttgacgattatcttgtgaacaataatcgacctctttactcatcatattttattatttttgaaatcaatccatgtcagttttttccatatccattccaaaggcccttgtctgtgtttctttagccacagattactagctgcaagtagtacaacaaatataattatagctataaaaaggcaagctgtagctccagttgatttataaagattgaaaccgaatccataaaacaaggtgatgccgataattgattgtgtgatatagtttgtaagactcattttaccaaaagggataaaaagtctttgaaacttatatccattgcctttgtcgtaccataacaggataaagcatccaacaagcagccccataaacaggaaattgcatattgacggaatagctatatcaaggggcataagaagtgctttattaccttgggctatatctggatagaccattcgggctacattcaaaggaataaaaagaagggctgaccataaagttatctttttccataaagatatggattggggaatattcttaaaaagagacagtcttccagcaatcattccaaacaaaaacaatcctccaatctggaatattcttccattttctatttgccagagattaccatacaattgtccgtaggttatgttagactgtacaacttcgaaaaaacttccggattgcatcacaggtttggccaaggctccatacttcatccagtgttcaccgtattccaagaaaggaacatcatacagacagcatattacccttatccattctatcggttgtataatcatcaatgaggctattatgagtattttccttgtagaaagatgagaaacagagacaagaaagagccccattaccgcatatagcaacaatatgtcgccattatagaacaaagagtgtaactgagaaaacattaaaagaagaaacattctccatacaaatctgcccttaaatggaatccctcttttttgagcattactgaactgaatgtaaaaactgaacccaaaaagaagagagaaagtggagaaggcttttcccgccatgatgaaccaggttgtattccatatccctttatctaacgatgtaagccattgcggataatcatccggtatgtaatagagattatagtgttccaaacaatgtacaattacaattgcaaacaaggcgatacctcttaaggcatctactacttcaattctatcagctgtctttgggggcatttttattatagtattaaaatgggtcaacgtaataatctgaggggtaaatccg

SEQ ID NO: 3761 - DNA, 2150 bp, Unknown
  gut microbiota DNA sequence
taaagaagacagccaccacagcagcgacagccataacaagcggagttgcttctcttttcggaagcggaaaactgaaagaactggaacgtgccaacgaaaaactgcaagacgaggtttcaaaacgggacaccaatattgaaaaattgcagagccaaatacagcagatgcagaaacagcatgatacgcaaatccacaatctcaaggaaatgcacaggcaggaacttgacatgaaagaaaaggaactgtcacggctcgccagaatcatagacaaggctttcaggtggttcccgatgttcagggaaatgctgcgcatggaaaagttctgtgccatgctggggttcactaaagaaatgaccgaaaggcttgtagtcaagaaagaggccctgaaatgtagcggtaaaatctattccgagcaacacagacggaactttgatatcaaggatgatgttttaagggtggagaatgaccctgacgatgaaagcagactgaacctgacaataaacagggaaccgattgctgaatggttcagggaacaatggcacaggcttagatatggaacaagcctgccacaacaagaagaaaagaaaagccgtggcataaaattataaatatatagtgcaaattatcagatagtttcgctacctttgtaactggattgagacaactccatccaatatgatatttaagatttaaaagaagcgttatgcttatcttgtaattggaaacctgagaaattttcaaatgagcaaggatagcatagtggttctcacgcatatagcgtgggctgctattgttgtatctgctcataaggtttctcaggacctccaattaaggtatggcattgcagttccacgcttcaaacataatataataatgtccttgtggcagctggaggtaacattaaatcataaaagtatgaaaagaattttgttaattgccgttgtattagtaatttctatttctctatttgcacaaaaagatgttactaaatttttgggaatacctattgatggttttaagcctgaaatgattcaaaaacttaaagaaaaaggatttgtaagttctgcaagtgataaaagtatattagaaggggagttcaacggaacacaagttagcgtacatattgcaacaaacaacaataaagtatgtcgtattatgctgtgtgatattaatcaaatgggagaaacggacataaaaattagatttaataaattatgccaacagtttcaaaataattcgaattatatcagtttcggtgattatacaatagctgacgatgaagatatagcttatgaatcaacagtaaatgataaaagatatgaagcaatattttatcaaaagccattagctcttgattctattgagattgctaacaaattacaagcatatattttagagaaatatactccacaagaattagaaaacccatctgaagaaattcaaaaagatatatataaaatgtctttagattatgcaacagaaataataatgaaaaagcctgtatggtttatgatttctaaatacttaggtatgtattatattacaatgttctatgacaatgaatataatagagcaaatggtgaagatttataatcatataaaaagtaattattatgtcaatatcaaataaacaagagttaactattcattgcggaaaagcaacgaacagttttgaagaattaaaagccctgtgtgaacaacatgcaaatgaattaaagcttcagctaaatattgctgctcatgaaaaagcaactgtaacattttggacagaggattttccagaactaatttgtattggaacatttgaaaaagatgattcaggggaaactatattcatattggatttttcggaatctacactgtaaagacagattgcaatatatcttttataaatatgcagatgaaaaagatttaatcctttttatctgcatatttttattcttaatataaatacaatatttatagtttagtgagtaaataaaagttgaatgggaacattttgggaacatacaaataaaaagaaaagggttaaatacttgatattcaaatacttaactctttttcttgtacccagacccggggtcgaaccgggatggatgttactccactggtgtttgagaccagcgcgtctaccgattccgccatctggg

SEQ ID NO: 3762 - DNA, 10175 bp, Unknown
  gut microbiota DNA sequence
cttttcttcacccacatattctacgagcgagaataccagacaacgatacgtcaccccattttcagccttataattctccttacggcgataaatcaaagtctgtttttccactgcccttccggtagccatagagaaaagaatcttctgcccgggcttgtactctgtagggtcatacgaacgggcctgcaagaggatactcagcatatcgtacacacataccggcatctcgtcatgatgtttgtccgtattaccgcgtaaggtgcgttgctgatcgacgatgcactttccgttctggtaactgaatttcacctcatctaccgtgtagcgttttccttcctccgctccctttcggaaatacaaaggaaccaaatcctgcgaagtgatacaggtcagcgtgtcacgcatcttgaagaagaagtcaatcttcttgttggtgtacgactgcaagtccgttttcaaacatggacgaccgttataagtcgtctcgtttaccgtcatctttgcccatccggcattaatccagacgaatttccagttaaacttcagctcataagagagtgtttctcctggcttgattgcatcattcactgcaccacattgtgcgctggctgccatccctcctaccagaaggaaaaggcaaagaatcagtttccttatcatgttcttcctagtttacgagcccgctccttgttgcggtctttgattttcttggcctcatcaggcttttgtttctttatctcgtccaacttctgtttgtcaagcggcacagcgtgtatgtcccacgtttcttcaaactcaaagttggctttcatttcccacactttcgggaagtagtacacttcttccggctggcgcttttctgcgtaattaccggtatcccacaccccgttgttattgtcatcgttgaacagacggatgtaatatttcgtgctgggctgcaaaaaatagaagtcacacgtattcttgtccgtcaccggctgctgccgcaccactccgtcactgctgttcagcaactgaacgatggcatgaggtcctgctcctacgatattcagatacagtgtgccataatcttccaaagtcttcaccttcaactggttttccaccttgttggtatagagtccgtaaatacccttgatacccaacgaatctatcttgagctgatactcctgtccaggttgccagtcggccagaatctgatactgacggggaagcacggagtctgccatcagaataaacggtatatcctcccacagcgagtctaccttgacagccatgtgaatggccgccgtgtcaatatgttccaccggctcctcaaatttcagtacgatgttccggttcaagtccagactggaaggagcatctaccgacatcgcaaagaatttcggttccaccttcagcgtatcacctttctttgcacgttttttccgctctttttcttccttcttcatggcttcttcggccaaagccatacgtcgtttcttgtcaatcttgttcaccatacgcaaggtatcggtcttcggcacaagctgtcccagtgtatccgtggccagatagtccatctggaaggtcaacgtatcacgttcgcacatcacggtatccttaatccagtaacgaatggtatcgttacgcggattactttcaatgataaatgcatccttctcatcaaaatccaatcccttgatggtaggaagcgtatccgctttggcactgaaatacaaagaaaaacggttcaactgttcacgctcgctcttcaccagatactgcatcggattctcttccttgaacgaacgaagaatcaggttatcgggcaagaaacgtgtataatgcacctcgtaaatcgtatcataagccagtgtatccaactcattccatacggtatcctgacgtacatccggacgcatgtcgggcaccaccaacgaatccaagaaagcaacggcctctgtcttcgaatcaaacaaatagttctgattaccgtccatcaaggcataaatgcggtattttcccggggcaaccccgcgaatggtaaaatgcccgcggctgtcagtacgtgaaatacggtcgaacggaagcttcacgaatgcactgtcttccaaattcttatgaagccctacctgaataccctttaccggttccaggttgtcagccgacagcaccgtccccgatacctccatcgtatcaatatgctcgcccgtagagaaagcgtatgcaaagtttcccaacgggttatcttcgttgttgtccacaatggcatcaccaaaatctatcgtataagtggtattttcacgaagggtatcgaaaaattccaccaggacccgatgaccgctcaccttcacttcgggcgcctcattctgaggaggcgaaataatcaccttctccgatgccttgtccagcttgatgtattcatcgaattcaatggagattttcttgcgcttgttgttcgtggcattgggttccggcgtagcacgcacaaacttaggcggtgtttcatcatacggtcccccgtcgggcatccccgtgctcgcgcatgcataaaacccgataatgaccagcaacaaagcaatatatttaggtataggtttcatctatatagtttagttattcagtttcaacatttcttcaatatagtcacggctgttgctcaagcgaggcactttgtgctggccacccagctttcctttctgtttcaaccagtcgtgaaacaggccttcacgagccttgattacttccagacgctgcaaggtaatatctttatgccgtttagcctcataatctgagtttatttcctgcaacgcggtatccagcacctgtgcaaacttctccagcgaatccggcatcacgctgaattctatcagccactggtgacgacacttggcattggcatccataaagacaggagctgccgtatattccagtacctgtgcaccggtttccttgcaagctctttccagtcctttttctgcattatctaccatcagttcctcaccgaaagcattgataaagtgcttggtacgaccggagataataaacttgtatgggtctttctgtgtgaatttcaccgtatccccaatgatatatctccacaaaccgcaggaggtactgattactaccgcatagttacgtcctacttccacgccccacaaaggtacaatcgtaggattcggcttatcgatttcctccaaaggaataaactcatagaacacgtcatagtcaatcatcagcaacatggccggatcgtgcaaatcgctttgcaggccaaagaagccttcactggcattatacgtttccatgtaatgcatcttgtctgtcggaataagctgcttgtactgttcacgataaggtgtgaagcatactcccccgtggaagaaaacctccagattaggccatacctcattcaaatgtttggcacccgttttctccagcacacggttcaacacggccaacatccaggaaggaactcccgaaatgttggtcacattctgatgaatcgtggtactggcaatgcgttccaccttctcttcaaactcactcaataaggcaatctctttcttcggcacccgaatcaggttcaccagcggactgatattctgaatcaggatggccgacaggtcacccaccagactgtccttcacgttatagttcgggctatgactgcctcccaatatcaatcccttacccgaaaagaaacggctttcaggattttcacggaggtacaatgcaaccgcatctattcctcctcgataatgaatctccttcaatccgtcgggactgacaggaataaacttacttttatcattagtggttccagatgatttggcataccagatgaccttccctggccaaagcacatttctttcaccgtgacgcatacggtccacatatcccttcacatcctcgtacgtctgtatcggaacacgctgaaaatccgtataatcctggatatgattataatcataccgcataccccactctgtagcggaagctttatgtatcagttttcggaatacacgagcctgaatttcttcggcctttgtcccataaaggtcgatttccttctgtcgggggacaaatatttttcctattaacttggttgaattcattggtttctaaatttcaaatccttatatgtgatagatgcaaaggtagattttttctgactaaatcagcagagaggaacattattttttcctgcatcatgacaaatatacagttttttcttacctttaccacacaatctattaatacagcaaaacatgaagataggaatcttgacttcaggaggcgactgtccgggaatcaatgccaccattcgaggggtatgcaagacagccatcaaccattacgggatggaggtttatggaatccatagtgggtttcggggactgctggacaatgacattgttccactggacgaaagctcactgacaggacttctgaacctgggaggaaccatccttggtacttcacgcgaaaaaccgttcaaaagaaaagcgggtgccgtatcggaaaacaaacctgccatcatgcttcagaccatccgcgagcgcggcctggactgcatcgtgtgcatcggaggaaacggtacgcagaaaacagctgcgaaactggccgaagcgggagtaaatgtggtaagcattcccaaaaccatcgacaatgacgtgtggggaaccgatgtttcttttggtttcgattcggccgtaacaatagccaccgacgctattgaccgcctgcattccactgccagtgcccaccagcgtgtcatggtcattgaagtcatgggccacaaggctggatggattgcccttcactccggtatggcgggaggaggcgatattatcctgcttcctgaaattcctttcgacattcaccgtatcggcgatgccattatcaaccgcctgaaaaaaggaaagccctactctattgtagtggtagcagaaggaattcctacaatcggaggtaaaaaagctgcgcaatacattgccgaggaaatagaatacgaaacaggattcgaaacccgcgaaactgtattgggatacatccagcgcggaggaagtcctacagcctacgaccgcaacctggctacccgcatgggaggacatgctaccgaactgatagcccagggtatgtttggccggatggtagcactgaaaggcaataccatcgagtctgttccactgagtgaagtggccggcaagttgaaactagttacggaagaccatgacctgattgtgcagggccgccgcatgggtatttgcttcggataaatatacattttatacacataaaatcatccccaaaaacgcacttgcgtttcaactaaaacgtccttgtgtttgaagtaaaacgcacttgcgtttgaagtgaaatgcacttgcgtttcatatcaaatgcacttgcgttttgaaaagggccaaaaagcactgaaaaaaggggataccaacccagttgataccccctcatatacaaaactgtatccaattacttatttaatttccaagtgaagccatccttggtgtctttcacttcaaatcccaaggcagccaggttgtcacgaatcttatcgcttgtagcccaatctttgttggctttagcctgcatacgctgctctaacagcatgtcgactacttttccgtaagcttcttcacgtgctgcattgttttcagcttccgctttcagaccaagaatatcgaacacaaacagatggaacacgctcttcagttcttccaaatcttcggcgctgatagttgctttcttgtcaatcaccgtattaatcatacgggttgcatcaaacagatgagaaatgacaatcggtgtattcaagtcgtcgttcatggcctcgtagcatttctcacgcaaacctttcggttcgatgcctgaagtagctttcgccggagtgatacggtccaaattcttcacaccttccaacagacgttccaatcccttttcagcagcttgcaatgcttcgttactgaagtccaccgtactgcgatagtgtgcctgaaggatgaagaaacgaatagtcatcggtgaataagcctgtgtcagcaacttgttagagcctgtgaagaactcatccagcgtgataaagttacctaatgacttacccattttctgtccgttgatggtaatcatgttattgtgcatccaataacgtaccatctgatgaccttctgaagccacagcctgtgcaatttcacattcatgatgcgggaacaccaagtccattcctcctccgtgaatatcgaaagtttcacctaaatatttgcgtcccatagcggtacactcgcaatgccagcccgggaaaccgttactccacggtgacggccagcgcatgatgtgttccggctgtgcacacttccacaaagcaaagtcggccgggttgtgcttttcatcctgtccgtcgagttcacgggttgtattcagcacatcatccaggttacgtcctgacaacacaccatagtgatgatctttgttgtacttcgctacatcgaaatacacagaacccttgctttcgtatgcatatccgtttttcagaatctcttccaccagcttaatctgctcgatgatgtgtccggatgcatgcggctcgatgctgggcggcaacacgttcagtgcttccattgccttgtggtaacgcaacagataatactgcaccacttccatcggctccagctgttccagacgtgccttcttggcaatcttgtcttcgccatcgtctgcatcatgctccagatggcccacatctgtaatgttacgcacataacgtaccttgtagcccaaatgagtcaggtagcggaacacaatatcaaacgtaatggcaggacgcgcatgtcccaaatgtccgtcaccgtatacggtaggaccacacacatacatgcccacatgaggagcatgcaaaggcacgaacagttccttcttgcgggtcagtgtattgtaaataaaaagttgattattctccataattcaatgagttaggatgcaaagttataaattaaaaagagaaaagcgtgatttccactaaaaaatcacgctttttctcttttgaaaactcctcaaactattttgtcagaataatacctccatccggttggattactacttttacctctgccggattcttgattttcagttcttctaattgcggctgacctttcttatcgtccagataataggaaaccgtttcacctttctcccacatcggcaggttcaagctcaacttcaacggttctttctgtgcatttacgcctaccacataccagcggtcaccatgacggcgggccagcacacagtatttgcccggatagccgtcaaggaacaccgtttcatcccacgtagtaggtacctgcttcataaaatcgatggccagtgccggtgcatctgtcaggttgttcggagcaagggcaaagttctgaatcggattctgatacagcaccgccgtagccagctggaacacgtctgtcgtcttacggatggtacctccgtcattcgtacggttgtgacgcttgttcagcagcgtaccgccaaactccatacagccgatggtattgcggataaacggatgcagacaggcgttgtaagcctccatgtcatcgaagtgctggttgaatatcaggttctcagaagcaagtaccgcctcactgcccacatagttgggatacatgcgttcccagccgcgtgggatggtacagccatggaagattatcatcaggccgtattcgttggcatcagtcagaatatcttcatacaagcccatcatctgctgcttgtcactgccgaagaagtccaccttcaagcccttcacaccgcacttctgcagccatttcatctctttcttgcgggctaccgaattgctcatgcactgcttggcatcctgaggtgcatcgttccagtaaccgttggagttgtaccacacaaacacatccacgttcttctgatgtgcatacttgaacaactcttccatgcggtcacgtccgatgttcttttcccagcctccgtcaatcagcgtatattcataacccatttcactggccaggtcaatgaaacgaatctggtcatcgtagttgatactcgggtcctgccacataatccagctccatgtagaacggccgaacttgtattcctgcgaaggatcatacagcggttccaccacatcaaacggaacggtagtctccacaatcggcttcagtccgctgcccaccgtaatcgtacgccagggagtgacacccggcagagccagtcccggagtagaagaacccagaccgttcatctcgcccggattcgggaaagcaatactgtaaagaccatctttagtagcatcactcaggtgagaagcacaatacagactgcgtacaccggtctccgataccagcgcccagttgtcacccacatgaaacagtgccgggaaagtatagccttcaccatacttggaaggggtagccaccggttcatcgggtacatattcctcttcgtagctcggtttcgtacgcatccagccaatcatcgggtcactctgcggagaaaggaacgtggtagtggtagaaggaaaatcaaagccagtcgcttccttttcaatcaccatacaggccgtttcgccatactgaggcatctcatagcgaaaagctatgtcgttattactcaactggaacacgatgtccagtttcttcttgtcggcattttcaagggttacagtcagcttgttggcagaataatttaccgtagaacacttgatacggtcctgcgtgtacgtcttttccaccttgtctgcctgctggctgacaaagctcatctgacggctgaagtcgccgatattggagacaaagccgaggggagagttctccagcacggtctttccatcgtaggtcaccgaatagacaggcttgccgtcctgcaactgaaagtcgagtttcaaacgagcatcagggccggtgaccgctgcctgctgggcaaatgcctgagaggccaataatgccaatgtgccaaaaaatacttgttttttcataggtgtttttccaaataattactaatcaaggcaaaaatagagattaggtgtgaaatcaacaataaaattttcgctaaaaagctatcacaaatcatgcaatatcgacacaaaaaagatgccgctcaggaggaaaatactccctgcagcatccctgcaagcatcacttttagaagttgacaaccggccatccgtcaggtgtccaggtcatttcacgaattatcaatttgggggctccttcttctgccacagagtaggcatgagagataaaatagtccttcccgtccagatgataggctgcattatggcctactccggcatagtccttgtttccctgaatcactaatgaaccacctcccttattcatagcttttccgtctttgtctaaataaggtcctgtgacagtcttcgaacgtccgaccatgactttataatcacttttcaagcccttacagcaatagtcaaatgacacaaacaagtaataataatcaccgtgcttcatgataaacggcgcttcaactgctccatcacctgcattctcttcgtccaaattaaaggtacgttgacggcgagaaagtgaataccactcttccggctgagccactccattcatatcaggagtcagctttaccatcttgatgccatcccagaatgagccgaaattcatccagggtgtaccattttcatcaataatgatattgggatcaatagcattccacatatcccggttaggtaccgactgaattacttttccatggtctgtccatttgaaatcaggactggaagggtcgagcgtaggattggttgcgtgaccaatagccgaagtattctttccaaatgccgaacatgaataaaacaaatgataaagtccgttatggaaaataatatccggtgcccacgtgtgtccgttataaccttttacggtttctaccgcccattgcggtgcctcctcgaataccggtttttcaaacttccagttcttcaaatcctttgaagacatcacggaaattccctgtccggtagcaaagaggtaataggtattaccctgcttagccagcactgggtcatgggtcatgactttgctggttggaatgaccgacgacttcttaggagaagaagcgtaagctgcgcttgctgcagccaacaaacaaaatgaaaagatgatgtgtttcatggcttacat

SEQ ID NO: 3763 - DNA, 1611 bp, Unknown
  gut microbiota DNA sequence
aagaggctgtctcaaaatgagacggccttttttgtgtttgcaaaaaaaatcgggcaagtcctaacttcgctcagtcagaacttgcccgtctccctaattttttgtatcttagggaatcaagtcaagatatcccaaagataatgtttaaaaattacacatccaacgataatctgcttttacctccgtgtttaggcgattttattccccagaacgatccggtccgggttgttcaccgtatcattgaacagataaaccttgaagaactttaccgcaggtattctcctaaaggctgttctgcataccaccctcgcatgatgcttcagattctggtctatgcttatctgcgtaatatctattccagccgtcgcatagaagaattctgtcgcaatgacatccgcttcatgtggcttaccggcaatgtgactcctgaccataataccatcaaccgtttccgcagcagccggctgaaggatgtactcaagacaatatttgccaccatcgtgaagttcctcgtgtcggaaggttttgtaagtctggatgtggcctgtaccgacgggacgaagatggaggcggacgccaaccgttatacgttcgtctggggcaagtccatacatacgcgcatatccagaatcgcggaacagcttgaagagatatggcggtacgccgagtccgtcaccaagcaggaactgcgtgattccgcacccatcacatatcaggatatcactccggagaaagttgaaaaggcgctctgccggatagatgatgccctgaacggagtggatgctgacaggaaaatgaaagcgaaggtaaaacgtgtaaggaagtcatggcccgaacagctcaggaaatatgaatcacagggaaagatacttgacggacgcaacagttactcaaagacagacaatgacgctactttcatgcgcatgaaagaggaccatatgaggaacggacagctcaaacccggatataatccccaaatcagcaccaacaaacagttcattttgaactataccatccatcagtgtgcgggtgatacctccacctatcctctgcatatggatgatttccattccctttacggcagataccctgacgtatctgtctgcgatgccggatacgggagtgaggagaactatctgtatgccttcagacatggcattgaaacctttataaagtacaactattttcataaggaacagaaaaggaacttccggaacgacccgtttctgtcttccaacttttattataatgaagaaaccgacggcatgtactgtccgatgggacagagaatgaaaagactctccgatgcaaagaggataacagacaacggttttgtgcagaccatatcaagatacagggcacataactgtaatggctgcccgctaagatgccggtgtcacagaggccggtcggaaagaattgtgcaggtaaaccaccgtctgcggaaaatcaaggaaagtgaacgtgaaaagctgctctctgatgaaggcctgaaatatcgcagccagcgaccgcaggatgtggaagccgtttttggaaacctcaagaacaacaagcaattcaagaggttccatcttcgtggacttaagaaggttgaaattgagttcggcc

SEQ ID NO: 3764 - DNA, 62733 bp, Unknown
  gut microbiota DNA sequence
cattactaattgcccgtcagctttccttatccgcgcggagcggatggaaacagtcatcagaaaggatgatatatacgtttagcagaaagaagtgctgaaattgcttgcttgtgagtcatgaatacataaatgatattcaggtgactattgcacgaaggttccacctcttcccattccgaacagagaagttaagcttcgtcacgccgattggtactgcgcaagtgggagagtaggtagtcgccgtcttaactgaagccctgaagcggaaacgcttcggggcttttttgtgtccgtactgtccgtgcgtctgcacctgcgtccgtttccgctccttccgcggcaggcctcctccctctgctgacggtttcttcttcccttgctttttccccttgctatcctttgtttccttaccgctcacccgggcggctttcagaaatccggcaggagacgttttctccgaaaaggagagtcattcttcatcggaagctccggatacgctcagaacgggcgaaaatccctctggaagagggactactttggaatgttgtgtttagagtagaattttcagaggagaacataaaaaaagccggagtatttaccccggcttgtgaaaatattaattagaaattttatttctctgcattgtctttgcttggatgaggatagtcaatcgtgtaatgaagccctctgctctcttttctttccattgcctggcgagtaatcaggtaacctacattaatcatgttacggagctcgcaaatctctctggaagcctttacacgtttaaacaagcgctctgtttcttcatagagaatatccagacggttccatgcacgcaccagacggagattgcttcgtacaatacctacatatgattccataatctgattaacttctttcatactttgtgtaatcagaattcgttcttcgttgctgatagtgccttctgcattccattccggaatatcttcgttgaaatcgtaacggtcgagtacactgagtgcgtgtttagcggcagagtccgcataaacaatggcttctatcagtgaattggatgcaaggcggttgcctccatgcaatccagtgcaagaacattctcctaaagcatacaggcgcttgatgctggattgtccgtccaaatcgaccttgatacctccacacaaataatgtgcagccggcgctaccgggatatagtctttcgtaatatcaattcccaggctcaggcactttttataaatattggggaaatgtttctttgtttcttccggatctttatgcgttacatccaggtatacatggtcttcaccacgttgtttcatttcattgtctatggcacgtgctacgatgtcacgaggagccagtgaaaggcgcgggtcgtatttctgcatgaattcttcactcgacaagtttctcagtacacctccataacctcgcatagcttctgtgataaggaagctgggacggtcgcccggatgatacaaggcagtagggtggaattgtataaactccatgtccttgacaactcctttggcacgatataccatggcaataccgtcgcctgtagcaaccaatggattggtggtgtgggtataaaccgcttcacatcctccagtggccatgacggtgattttagaaaggaatgtatccacctctcctgttttttcattcagcacgtaagcaccgaaacatttgatacccggcgtgtgacgcgtaacgataattcccaaatggtgctgggtgatgatttctaccgcatagaaattactgaagacggtgatattgggatggcgttttacttcttctatcaggctggtctgtatttcagcaccagtattgtctttatgatggagaatacggaattcagaatgtccgccttctttgtgcaggtcgaactctccgttgtctttcttgtcaaagtttactccccatttaattagttcttctatttgagaaggcgcgttgcagataaccttttctacagcggcaggatcgctgatccagtctcctgcaaccatggtatcgtggatatgtttttcgaaattatccaccttcaggttggttactgaagcgatgcctccctgtgcatagtaggtattcgcttcttccagtccggccttgcagatcagtgcaaccgaacctttatgcgccactttcagcgcaaagctcattccggcaattcctgaaccgataacgagaaaatcgaattttcttatcataagattgggtattataacgcaaaactacaaaaaagtcagttatatgatgctcaaaagcattcttttttgtgtgtctctgtagattgatttttaaaatacttaaagatgcgttggagatgttttgttttcaagcagaatttcttatcttcacgggaaattaaaacaaaaaatcagacaatgaatcgtacttttcaatcaaaggttggttggtggtattggatagtgataggaataacttctgtgttgttattcttttttttctgggaacattatctgctgtgtacaattctgtgtgcaactgtggtggtttttgaaatcgaaatgctggttcatacgcagtatgtaattacaggagatggatggctaaaagtagagaccggacggtttatccccaatgcttcacttgaaatagatcagattcttcgtatacggaaagtccgttcgatgactttctggcaacctgctttgtcgttcgagcggcttgaagtcgtttttaaaaaacatggaaaggtccgttccatttctctttcccctaagaatcaggaagattttatccgttgcctgttgaaaaagaacgaggcaattcaattttatgattgagacaaataattaactgataaaaatactatggtacgtgagtttaaaatccgcagaactccttttaaagtgtggttaggagtcattattgtgattgtggccattgtgctgatggctttgcatacagaaaactattggaatttgatgccgattgtgcttcccgttttattgttgattgatgagcagatgacgcgtattctggtacaggaaaacggggatatttggttgaaaagaggttttagtggcagtatcaaggcgtatggagtaaaacggattgcattgcgtaagaaagattcgttgctgaaaggaagaattaccatatattatacgaaagggttcattaattttgacccggccgatttaaaaggatttgtggcttgtgcgaaagaacgcaatcctcatgcagactatcgtgaagaataatcatttctaaaatttggacggattatgaagtatcaattggctataattggtggtggcccggctggatatacagctgctgagatggccggaaaagcaggactgagtgtagttttgtttgaaaagaacaacgtgggcggagtttgtctgaatgagggatgtattcccacaaagaccttgctgtatgtggcgaaagtacacgatacagctttgcatgcatcaaaatacggtgttaatgtgaaagaggtttcagccgatttaggaaagattatagcccgaaaaacgaaggtggtcagaaaattggtactgggtatcaaggcaaaactcacggcacagaaggttactttggtgcaaggggaagcctacattcaggatgcacatactgttcgttgcggtgaggagttgtatgaatgtgaacagatgatagtatgtacaggcagtgcgacttttattcctccggtggcaggacttgattcggtgaattactggacacatcgagacgcattggacaataaagaaatcccttcttctttggtaattgtaggaggaggagttatcggtatggaatttgcttcgtttttccacagcttgggagtgaaagtaacggttgtggaaatgatggatgaaatcttaggaggaatggacaaggaattgtcaggccttttacgggcagattatgccaagagaggagtgaagttcttgctgaatacgaaagtaaccggagttacacagaaggaagacggaatagaaatagaatatacctgcggagaagaaaaaaatacagtttgtgccgaaaaactgttgatgagcgtaggacgccggccggtaatgagcggattcggattggaaaacctgaatctggaacttacggcacgtggaacggtgaaagtagatgaacatctgcaatcttccgtgccgggagtatatgtgtgcggtgatttgaatggagtatctttgctggctcatacggctgtgcgtgaagcagaggtggcagttcatcatattttaggaaaaacagacgccatgagctatcgtgccataccgggagttgtttatactaatccggaaattgcttctgtaggttgtacggaagaagcgcttacacgcgaaggccgtgcctatcgtgtagtaagcttgcctgcagcctattcaggccgttttgtggctgaaaatgaaggagtgaatggagtctgcaaagtactggtaggagaagatgaagaaattttaggagtacatttgctgggaaatccggcttctgaattaattattcaggcaggaatgatgatagaagacagacgtaaactttcagactggaaaaaatatgtctttccacatcctacggtaggcgaaatctttcgcgagttataaattgaagtgttgaatgaaacgaataagcggagtattattttttttatttctttgggccggttttcttcatgcccagacgttattaacaaacgagttaaacaagttaatatcttccgaccccttgttgaaaacctcggaagtaggtattgtggttcatgatttgactgcaggcaaggagctttatagctatcaggcagacaagttgtaccggccggcttctattgaaaaagtggttactgcggtaactgctttggatgtattaggaaaggatttccagtttcagactacactttcgtacgacggtgtggtggaaaaaggaatcttgaaaggaaacctgtacgtaaaaggaggttttgacccggagtttatggagttggatatggactttctggtcagagccgtgaaagaggcaggcatacaagctatttccgggaaacttgtgggtgatgtttctttgatggattccatatactggggagaaggctggtcatgggatgatactccagaagctttccaaccttatctttcaccgcttatgctgaacaggggatgtgtggatattaaggtatctcctgctgccaaagggaaggccggaaccgtggaaattactccggaatcagattattatcagttgaacaatcgttctataagtctgcaccccgaagctggaaaactgaaaataacgcgtgactggctcacaaacggcaatacgatagatgtgtccggatgtgtttcttctgttcgtaagcgtacgctgaatctgtatgattccaagcgattctttatggatacgttttgttataagcttaacaaagaagggctgtccgtatcgaaagacagtattttctttttaaccgctcctgatagtacacaatggatttacacttgccgccgtccggtggaggaagtgttgaagcgtgccttgaaagaaagtgacaatctttctgcggaggccttgtttcgtcagttagggcaaatgaacgggaaacatacttcacacatctcttttggggactgtcaggttgtaatagggagattcatgcgcaatgccattgggcatgaccccaaggagtatcgaattgtagatggtagtggagtctcgttgtataattatgtgtctcctcgtctgatattggcttatctgaactatgcttatcgtcatccgtccgtgttccagactttctatgactgcctgcccgtagcaggagttgatggtacgcttcagggaagaatgcgtacgggaaaagccttccgtaatgtaagagcaaagaccggaactgttacgggaatcagttcattggctggttatttgacatccgtgaacgggcacaaaatttcttttgttatcattaatcaaaatgtattgaaagctcgtcaggcccgtaaactgcaggataaaatttgtgagttattgatacagctaaattgagtgaaaaagtctgctgaaacgtatttttagtaggaaaaatcaataaatacacaagaagtagcacaattttataggttttgtgaacaaatattgtacctggatttcggctaacttttgtatttttgtctgcgtagagagaaagaactttaaacaataatataaagttgttctctgtttttcggggaacaacgggagattttaaaatttataattattatggtaaacttttcacttgaaggtaaggtagcccttgtaacaggtgcttcttacggtatcggttttgctattgctacagcttttgctaaagcgggtgcaactatcgtgtttaacgacattaaacaggaactggttgacaaaggtttggctgcatacaaagaagaaggtatcaatgcacacggttatgtatgcgacgtaactaacgaagatgccgtaaatgcaatggttgcacaggtagaaaaagaagtaggtgtaatcgatattctggtaaacaatgcaggtatcatcaaacgtattccgatgtgtgagatgtcagctgatcagttccgtcaggttattgacgtggatttgaacgcaccgttcatcgtttcaaaagctgttattccgggcatgattaagaaaggtcacggaaagattatcaacatctgttctatgatgagtgaactgggacgtgaaacagtttctgcatacgctgcggcaaaaggtggtttgaaaatgctgactcgtaacattgcttctgaatatggtgaattcaatatccagtgtaatggtatcggcccgggctacatcgctactcctcagactgctcctttacgtgaacgtcaggctgacggttctcgtcatccgttcgatgcattcatcgtggctaagactccggctgcccgttggggaactccggaagatttgatgggtcctgccgtattcctggcttctgacgcatctaacttcgtgaacggtcacgtattgtatgtggacggtggtattttggcttatatcggtaaacagcctaaataacttaaatttattttgtcgatagaatgtcattctgggggagtatgaactttctcagaatgactttctggtaaataactcaaagataatattatgagaaagactttgtttgctgccgctgcttgtgccgctgtattgtggaccggatgtagtaaatcagaatctgtcactgtgacaattgccaatcccttggctatagaacgtaccggggaaatggtagaaatctctgtaaatgatatttatacgcggttagatctttccgacactgcgcagtttgtaatttatgatgaaaaggcccaggaagttccttatcagctgacatacgatgagaaggtgatatttccagtgtctgtcgcctcaaatgctactgtcaactatacagtgcaacagggaactccttcaatggttaatacggtggtatatggccgttgttatccggagcgtctggacgacattgcctgggagaatgaccgtgctgcctatcgtgcatacggtccggatctgcagaagagcggcgaaagagcgtatggatatgatgtctttacaaagaatgtggaagagctcgtcgtagaagaccgttatgcaatggaactggattctgcttcacgtgcggaaatcaacgcgttgagagaagccggaaaaaaagcggaagcagacagtttggcgcgtgccatctcttatcatattgaccatggtaacggaatggactgctatgcggttggtcctactttgggaggcggtactgcagctctgatgccggactctgcaattgtatatccttattgctacaaagattatgagattttggataacggacctttgcgttttaccgtgaaactggtattcaatcctttggtggtaaagaacgattcaaatgtggtagaaactcgtatcatacagcttgataaaggctctcagctgaacaagactacggtttcatacgaatatctgacgcaggctactccggtagcagcagggttggtgcttcatgcggcaaatcctgaaggatatgcgtatgatgcagcgaaaggatatatctcttatgcagaccccacgacgaatgctgaagctggcaacggtattgtatatgtaggagcggtattccctgcttcggtacagactactacacagttgtttgaaaaaccggcaggcgatgcactgggacatgtattgggtatttctacgtatgaaccgggtaatgattttgtatattactggggttcaggctggagcaaatatggtttcgaaaaagcagaagactggaccaattacttgaaggattatgctgagaaagtacgtaatccgctggtggtgaccgttcagaaataaaagtctgtaacaggaaagatataaagatataaggaaaaccgacagtgccgaatgaccgtttggggagattgggttctgtcggtttttattttgtcagtactatactgaaaatactgcagtactttcagggcagtactgtagtactttcggcagtgtactccagtactttcaaggaagtactggcatgacgaaggagagtctttttttcaacggctgatattaaggaaataccttaaactcgtagccttctgcaagcagccactcaatggagcggggaagggcatatttaaggttttcttccgatttcagggagtcatggaacgtgatgatagaaccgttccgggcatatttctttaccttctcaaatacttgcggaccattgatccgcttgctgtagtctcgcgtaaccaaatcccacatcacaatctggtatttctttttcaacacatggtattgcatccaccgcatgtgcccgtgaggaggacgaaataagttggtctgcaaataagcgttggctttatcggtattggccagatagttctggcttaaaaattcgaatcctcgtatatggttaaaagtatggtttccgatacgatgtccgcgttccactaccatttggaattctttgggatgcttccttacattatcacccaccatgaagaaggtagctttaattccatatttgtccagtaaatcaagtacccagggagtaatctcaggtatggggccgtcatcaaaagtgaggtagacagctctttcgtttttatccatgcgccagagagcttttggataaagcagacggataaattgtggaggttgttctatgaacatgtttttcgtcgttttaagaggtttgttttgcagaaagaattaaaagaaagaatgtcattctgaacctgcaaaggtggtgatattctctgtggtgttcagaatgacattctgtatctaatcattcaatttctgtattattgagcaggagcgctgttacctactcgtttttccagcagtttgtacagctggtcgaacttttgagcataatgcaaagcagatttgttttcttcacctgtcttgctgtctttcatttgcgccatggtcttgcatacatcatccagaatatagaaataacgcatgcagttttcgtatgaacttgcgaaacgggcatcgtccagactcaagtaccaggtagcatattctacagcgttgttggccagttcattgagaatcttttcagctttctgcggctgtcctaatgccaggtagttttctgccatttccttggaactgctcatcaggtagtcgtgcggaacagtggtcgaaggaatcactttttcgcaataatccaatgctttcagtgccttatccttcttgccttccttaatcaactggctggtcagctgtacgaacatgcggcgatgagtatcgcacatgcgtaataccgtttcatccaggtaaatgtcagggttgtcaatgccgccgaacttgaacttgttcatcaggttgtcgtacatcttttcgctgtcgagtcgtctgcctaatttcgcattgtcaaacggagtgatgcgataagccagaccttcctgcaagaagttattggtcaggttcaggtgattgtcagaacccacagtgatagccatgtacatcggacgttcccagttggtattggccaacatttccaacatcatcagttcgctcttatacagcactcgttttcctttcagcgagatatgcatgtattccggaatagaatcaggtgtcagcatacccgaacgtttgatggcttccttatccagttttatgacgatactgtcggtcggaatcatctgtaagtcttctttcggtgagcgtacccagtgttccaggatgtttttcagttcgtatggattatctccaaactccttggctgcctcttccgggttctttttgtagaattcaagaatggtcggcatggcatcaggacgtacgtacaccgcttcgttgtgaccggatacatagtcaatacgatcccagttgataggtactgaaggagagtcgtatgccggacggcgcatctggtcgatgtaccagtcagtctgcaggtaactcaggttgcagacacgtacatccgtgcgtacaccttctgtttcctgattataccacaaggggaatgtatcgttatcaccgttggtaaagagaatcggatttcctttttcgggtacagagttcaggtagttctgtccgaaatcgcggcatgtatagcggttgctgcggtcgtggtcgtcccatgtttggctgaccatttgcacgggcaccagcaagcagactacactggctaagatagccgcaggcttttcattgattttcttgctcaggtattcggctatggctgccactcccagtccaatccagatggcaaatgcatagaacgaaccggcatatgcatagtctcgttcacgaggctgttgcggtgtctggttcaggtaaagcacgatggccagaccggtcatgaagaagaggaagaagacaatccagaactgctggatacccttttctcccttataagcctgccagaacagaccgataagtcctaaaatcaacggtaaacagtagaatacgttgtgtcctttgttatttttcagttcacttgggagcagcgtctggtcgcctatcaacatgttgtcgataaatgaaataccggtaatccagtttccatgttcgatttctccctgtccctgaatgtcattctgacgtccggcaaagttccacatgaaataacgccagtacatgtagttcaactggtagatgaagaagaacttgatgttatcccattgtgtcggaatcttcaccataatcatttctccacactggtcgtagggaacctgacgtccttctactcctcccagccagtcttcgtaggcttgtgcatgtgcatcgctgtacatacgtgggaacaacatgttttgagcgtatttatactctgttttatgacgtacaatttcgtagctgtctttttcatccggatgttccttttctttccgctggtataccggagccccttcttccacgtcgtacacgcatcctccttcagtaggtttcaatgccggtttagaagcataagtttgtccgtagaataacgggcgggtaccgtattgttcacggcctaagtattctcccaaagtaaagatgtcttccggagagttctggtccattggcgtattggccgaagaacggatgacaatgactgcatacgaagaataacctaccacaatcatcatcatggccagcagactggtattcagcgtgcgtgcgctgacacggtatttttcaccgatattggcaaagaggtaaattgctaaaatagccagtacgatgataccgatgaagacactgctccagccgtgtccgtagaacggaatacccagcaaaccgacagtggtcaggaaagagatattcatccgcttgcggcttttcacggtgtagctttcgtatacaccccagatgatgcttgcagccagaataatcatgtaaatgatgacacccgtattaaatggcaggccgaagtcgttgacaaacaacagctcaaaccatccgcctaccttcacgatacccggcacgatgccatacaatacgacagctactagaatcatggaaccagccaaggctatcagactgcctttcaggttggcggtggggtttttcttgtaataatataccagtacgatggccggaatacacagtaagttcagcaaatgtacaccgatagacaatcctgtgaggtaagcaatcagaatcagccaacggtcgctgtgaggctcgttagcccggttctcccacttcagaatcagccagaaaacaacggcagtgaaaaggctggaatatgcatatacttcaccttctaccgcactgaaccagaatgtatcactccatgtataagccagtgcacctaccagacctgatcccatgatggtaatcagcttgcccgtagtcatctctttgtcatcggggcaaatcagttttttggtcaggtgagtaatgctccagaataggaacaggatacatgccgcactcatcagggcactcattatgttcaccattttagccacttgagtcgcatcgctggcaaattggctgaacaggttggctgtcagcatgaagaaaggtgcgccaggaggatgtcctacctccagtttgtatccggtggtaataaattccggacagtcccagaagctggccgtcggttcaatggtcatgcagtaagtaaatgcagccaccgcaaaagtaagccagcctaccagattgttaatcttgttgtactgtttcatgaattatttttagtttctcgttaaaattcaatgcggcaaagatagcaaacatttgcaaatcaagtcccaaaagtaaatgataatgttgcaaaaggcgttaaaagcagccttctactcttcatgatgatggcattttaatattcgatgaggcaggttgccgtgtcctaacagttcgataggacattcaaaatgtgcctccagccattcggcggagacttccgtatccggatggtaatccagcgtgccgtttacacaggcaatgctttttacgttttgcaggatggtgccgatatcgtgactcaccagcacgatggcgcattccttgttgatttcttccagcagtgcataaagacgagcctcaaaccgtttgtcaatgtacgtgttgggctcatccaggatgacgacttccggattggagacgagtgcgcgtcctaataaggccctttgcagctgtccgccacttaattgtccgatagctctttgttccaagccttccagtcccatgcgggcaatggtttcacgtactttgtcatgctgtaccttggagaatgagcggaacaatgatttttgtttatttaatccggaaagaaccacttcgtacaccgagataggaaatttcttgtctatagtgttgtattggggtaaatatcccattgtaatctcattcacctcctttccctgatgaaaaaactgaatttttccagccgtaggttttagtaatcctaaaataattttcatcaaggtggtttttcctcctccgttcgggccgattactccaagaaaatccttttctgcaatttccaggttgatatgttccagcacttttttctggtcgtatgcagcggcaatctcagtcagtctgataagaggttggttcatgaggataaattttagttattgttttttgtttaatgatttggctatgtgaatcatttctttgttccagtcatagcttaacgggttgatagggacgatttttagtcccagttcctgcgcgattacttccgcgttacgctggtcgaattcttgttgcacgaatacgactcttacctgtttctgtttgcaggttttcatcagttcctgcagatgactcggtgaaggttcctttcctccttcctcgatactgatttgctgcaggctgtagtctcgggcaaagtaacttaatgccggatggtaaatcaggaaacaatagtcagcgttcgccaaatagctctgcatttcacgttcggtacggttgatgacctgttgcaggctgtccaatcgtgtctgatagtaagcttgattgtccgggtctatctcagacaatgctttgcagatattagaggaaataatacgtgcattcgaaactgaattccagatatgaggttctactccgtctatatttccatgtgtatgggcatgaggatgtatttcatgaatgagatctactccttgtgacatatcatagaaaggtagtttgggcgtattggcttgtaatctttctgcccatgcctgttcaaatccgatatggccgatacgcagataagctttgcttcgtgccagttcaacgagttgctggggagtagggtcgtatatttccggattagctcctttgggaacaatactgaccacctggaatttgtctccagcaatggcttctgtgaaatatcgtaacggttcaatggttactgtcagagtaggggcgtcttcttttccttgctttcccgtacaagatacggtgagcagcaggatacttatcaaagtaaaaaaatattttttcatttgtttgtgtcgtattgaaagtgtgatacaaatatagtagtttcttttggtagcgggagactcctttgtttatttttaggttctttctttggttgcccgaagaatttctcttttacctcccggagggccaggaagccgctctacggtgaaaccagctgcctgcaacattctcctaaccactccttttgcgcagtaagtagtcaggattccaccgggattcatctggcggtacaagttgtcaaaaagtggctgactccacatctcaggctgcttttcgggagcaaaggcatcaaagtagaccacatcataacattcactgaatgagaagtgagtgaaatcaccttctatcttgtgtagtgtgaaataaggtgagatttttacttcctggttccagggagcagtgtgcagtgcgtagaatctctcacattcttctggagcgattgtttccggataggaaagtttgcgtacaatatcttccgaaagagggaatcgttcaatgctggtaaagtgaatggctctttgactcttttctgcttccagcaaggtcagaaaggcattcagtcctgtaccgaaaccgatttcaagtacacgaggatttgccgcctgagcgtgattcaatcccatttgaataaaaatatgtgctgactcggtcaatgcgcctttcacagaatgataatgttcattcagttcaggaacgtataatgtattgcttccgtcagccgtaggttcaagtgtaatcatctttatatcaacagttttttttaaaatccggtaatccttttgtggagttatttgttgggttttaaaaagctttccgggaatttcacatgttgttccgtgtggtcttttacacgaatccaggtacggaaccctttttcaccttcggtcagttcgatgacacgtgctccgttggacaggttattgtaaaccgtatttccaccggtgtaacgtccgtatgccaagagaataccttgccacattaccgcataatcattgtcgtgatcatgtcctacaaacactccttcaatgtcgcccatttctttcatcgcggtgaaaaggcctgaatttaaggcagaggcacatgctttttctttccgggtgccgaacaacgctgcattttcaccggctgcagcctgattgtattcaggaagaggaatgtggaagaaagccagcgaaggaaggggagttcccccgtttgcctgtgtatatttagaactatgctcacggtaccattgaatctggtcgaaatcgatataatcatatcctcccacttcctttatctgtgaataagaatgagaatcaaatacataaaggatttcagcattcttctgtccatcggatgatttgaccggtaggataaagttggttgtacctgaaataccctttgtggtagaagtcaggctatagggaatacgttgaatgattttcaatagctcttcacgagaaagcccttgttcgtcatcatgatttccgaaagttacagcaaaagggatttttcttttagatacctgttccaatacggtgcgtattccttcttctgcgggtttgccgtagataatatctccagtaaacattaccaagtttggattttcagcattcagcacttcattgatgcgttcaatggctacttctgcgcgcgaatcattaaaaatatagtgtacgtcggtaaactgaacgattttaaattttccgttggcattaaatcttaagtcttgtgcataagccagtgtggctatacataacaagtaatagatgcaaagaagttttttcatgttcctattaattttttcgtagacgattttcggtcgttttcgcaaagatagtcatatcttttgagcatgaaaaatttgcattggttttctatccgatgaatcggaatactcccaaggctgtggctacgatgatggcatagcgtgccagtttgccaatagtcatagcaatagtggtaatccatacattgcctctcataaatcccagtgcaataagtaaggcgtctccaatgacgggaagaaaagagaagaaggccatccacgaccctcttccgtgaataaaccggatggctttgtccatttgttttttgtctactttgaagtatttttcaatccattcagttttgccaattcgccctatccaatagcaggtaaaacctccgagtgcatttcctgcagttgtgaaaagtgtggaccatacagggtccaatcctaatccgatgcaggctagtagcacaacttccgaactgaacggtaggatggtaccggccaggaatgcagagagaaacattccccagtatccccagtctattagaaattgaataaatgcatccataaattcatgatacatacgcaggtccaggttccaagggatacccaaagaaagatacgggtaaaccggttgaaggtcagtgccagtaagtgaccacccatgacggaacctacgattaatgtcataagaaaataagtattgaaatgtgaaggcagaagtagcatacaagctaatgtgcctattcctgtaattatcaggacacggagcatgatacgcgtttgtactttgtcttggtaactatgtagtatacattctatactacaaatggctatgaataagattgcaatacctccggaaattaattgcggtaaagaaagaatagaatagtcgattggagaaaaacaggtaagtgctttgaaaggtagccaggtttcttccatgtttccagcgtaaagatgataggccaatgcaatccaataaggaaggaggagaccgatgagccctgcaaagaatgtacggagggtaaaagcccttaaaccaatcatatagaaataaatcagcgggacaaagtatagcacttgcggaagtagaaaactgctgataccgagacagaggaagctatgaaaaataggaaccggagcatataccgattcatagcttcggaataaataagagaaagatacggtgaacaataagggaatccattgctcatgtgaataggcgtgcaaaaaaggtagcccacttaaaaagaatagaaatatggccgcatgaagtgttgtacgtgtccggatgagtgaaaacgtggtattcaactcaatcaggcagtagactatggctccgtgaatggccaaagaaagtaaatctgtcttttcctgataggtaataccatacatgataagacagatgataatggtcaccggaagagtagcccttccggtggccagttcatattgaaatctatttcgggcaagcatgtgttacaggtcaaacccgatatctgaacggaaatattttttctcgaaacagatcttgcctgcattctggaaagactgtgccagagcttctgccttgttggctccgtaggaactaactgcgataactcgtcctccggcagtaaccacctgtccgtctttcaaggctgttccagcatggaatacgatacttcctcctgcctttgcttcttcaatacccgtcatcgggaaccctttttcataagcttccgggtagccgccagataccagcatgacacagacagctgagcgcgggtcaatttccagggtcttttcattcaggttgccctgagccaccccttcaaacaagtctactaagtcgctcttgatacgaagcatgacactttctgtttcagggtcacccatacgtacattgtattcgattaccatcggttcaccttttacgttaatcagtccaaagaagataaatcctttgtaatcgataccttctgcagccagtccttcaacagtaggacggatgatacggtcttccaccttcttcatccattctgcatctgcaaatggaactggagaaacagaacccataccgcctgtgttcaatcctttgtcaccttcgccgatacgtttgtagtctttggcttctggcaggattttgtagttctttccatcagtcagtacgaatactgagcattcaataccgcttaggaacttttcgataactactgtagcagaggcatttccgaacattccgcccagcatttctttcagttctttcttggcttcttccaatgtggggagaatcaatacaccttttccagcacacaatccgtcagctttcagcacgtagggtgcttccagtgtttccaggaaagccagtccttcttccaggttggctgcagttacgctcttgtatccggcagtcggaatatgatgacgctgcatgaaacctttggcaaattccttgcttccttcgagtacggctccagcctttgacggaccgataaccggtacctgcttcaatgcgtcatcgtttttgaagaaatcatatacccccttcaccaatgggtcttccggacctactactaccatgtcaatgccgtgggccgttacaaactgcttgataccttcaaagtcatcggctttgatagctacgttttcgcctacttcacgcgtaccggcatttcccggagcgatgtataacttttcaattttcgggctttgtgcgattttccatgccagtgcatgttcgcgtcctcctgaacctaaaagtaaaagtttcatatatgtatctgttttttagtctattatttcaaatggtcttcaaaatagcgggtgatgtgttcgtgcaggtgtacacggtcacgtcccatcatgttatgtccgtcttccggataaacgaagaaatccggatgggtaccagcttcaatacaagctctcaggaatgagtagctgtgctgtggaacacaagtggggtctgtacctccgataatgatttccagacggcctttcaggttgccagccttttgtttcaagtcggaacccttgtatccttccggattagtttccggagtatccatataacgttcaccgtacatcacctcatagaacttccagtcaatgactggtcctccagctacacctaccttgaagatgtcaggataagtcagcatcaggttggtcgtcatgaagccaccgaagctccagccgtgtacaccaattcgttcaccgtctacataagacagtgatttcaggaactcggcacctttcacctggtctttcatttcttctactcccaagtggcggaatgtacagttctcaaaagccagtcctcggttatcacttccccggctgtctactgtcagcatcacataccctttctgagccatgtataaatcccatcctctggcatcgtagaaacgcgtgttgtggatgagctgtgcgtgcggtccaccatatacgtagataatggccggatatttcttgttcgggtcaaagtctacgggcttaatcagacgataatacaagtttgttgttccgtcagctgctttaaaggtaccgatggtaatttccggtaacttaaactggctgctcatcgggtcatcagctttcagtaatgtagttcctttctttccgttggttggcagtaaagtgatttcacgtcctacattaaatgaagagaagttgtcaatcaggtaagtaccgctttcagagagagaagcccggtgcataccgtctttttctcccagtaatgtacgctttccagttttgacgttgaggctgaacagattggtttgcagcggagatatttctgtgctaccgataataatttccttctttcctgcattgaatccaagaatatcctgcaccagccagtcgccttgtgtcaaaggagttactttcaggtgttccagataggtagtgccttccagtttgccatttttccatgtaccttctccttttgccttcgtatccatcagatacaggtggttgaaaccgtcgcgttgactctggtaaataaatttactttcgtcccacggcaggaataccagcggatgctgaggttctacgtatttcgggttcttttcttcatacaataccccttcccgttcgcctgtggcagcctgatagcatacaagttgggcatgattctggtcacggttcagttcgataacataaatatgctgctcatcgggcgaccagctgacattggtaaaataacggtcggtcgggtcaccggcctgcaggtaaattacttttccagtctttacatcgtatactcctaccgtcactttgtggctggtcattcctgccatcggatatttgtccggctcaagagtcgcgatacgggtcgatgtattcacctgaggatagtctgtgaccatactctggtccatgcgatagaaagccagataacttcccttcgggctccagaatgtacctttataaataccgaattcgttacgatgtacagcttgtccgtaaactaccccttcttctgtttgtgaaggattaatctggtgactttcctcccctttgccagttacaaacaaaccgttaccgacggtataggccactttgtcattggttttgcaaaagtcaagattggtagctttttcgttcaggcgggatatgttcgtaatttttttctgtccgaagtcatattccacccaatagctgttctgttgaaatactatgactttacgctctgaccaaggcaatgaagccgacatcaggctgcgaagcggttttagttcgtgtgacagctgatagggcttctctcctttttcaatggcctgatttatctcttccagtgtgacaagtatgctttccttgccatctttcaactgaatgctgcggatgttttccacatccgcacgtacacatacatctccccaccattgcagtcccggaatgttttcagggactaagttgaaataattgtttccgcccggaatcacatcttccagtgtataggttttcttttcctgggcaaaagtggcgagagtggtcatacagcacaaaaagaataaaaagtatatacgtttcatgttctgtctatttttaatcttgtgagttaccttcctcctcgctgcggcgtctgtgcatgtagcgtggggcaggagccgctttcgggcgtccgtcgtctgtagaaggacgcggagtacgtggcttcgaatcttccttatatttgaattctttacggcgttcacgagtaaattcttttccgtcgcctgctttgcgtccgcggaatgtttctttgcggtcagcatctttacggaatccttctttacggtcgctgcggaaaccttctttccgttctccacgacctccgtctttgcgctccttacggccatattccactttttctccctgacgacgtggacgtgccggtctttcttcacgtttcggcttaaactccttgtcactgttgtcggaacggaattccttgtacttcccgtcaaacaactggtatttacggaactgacactccaatgctccattaaacaaaggtacttttatagaagccttcagtccaatctggtcaaaacattcgtcacggtagctcagaatccaggcgtcgtttccggtgaatgcatgcttcaagcgttcaccaatcatctggtaaagtcccagcaaatcttctgacgagatacgctctccgtaaggagggttggtgatgataatacttttctgtgcaggctgctcaaactgctggaatggctggattttcaggatgacatccttgcttactcctgcagctttcacgttatgctgagcaatttcgtttgctttcggattgttgtcgtatccataaatcttatgagtaaactcacgctcctgtgagtcatcgttgtagatagcatcaaacaaatcctggtcaaagtctttccatttctcgaatccgaattctttacggaatacacccggagcgatattgcgtgcaatcaaagcggcttcgataggtatagttcctgaaccacacatcgggtctatcaggtcacattcacctctccagcctgtcatcagaatcataccggctgctaatacctcgttcaacggtgcttccacctgttcctgacggtatcctctacggtgaagtgattcacctgaactatccaaggcaagtgtacactcttcctctgcaatatggatgtgaatagccaaatccgggttactgatacgtacggaaggacggttgcctgtcttttcgcggaaatagtcgactaccgcatctttcactttgtatgccacgaatttagaatgacggaattcattagagaacactacggcatctaccgagaaactactcatgttgtctagatagttttcccatgcgatactctttacggcctcatatacttcgtcggcagtcttcgcagtaaaatgtttgataggttttaagatacggatggcagtacgaaggcagaaattagccttatacatcatggctttgtctccggtgaaagaaaccatacgtcgtccgatttcaatgttgctggctcctaattccgtgagttcctgtgccagaacttcttccagtccctggaaggtcttggcgataagctcgaattcttgattcatcttgataaaattacgtaatttcaattgattgggcaaaaatacgaaatttcaggttgctagtcaactgtgtataaagaaaagatggcttatgagaaaataatttcataagccatctttatctataatgatttgtgtaatattaccaacctgggttgttaggagctaagttaggattgatggaaatttcattgataggaatggataataggtaatgttttggttcttcaaatacagcttgtgtttttactctttttccataaatatccaatgctccttcagaggtaaggccaagttcttctttcatatcgtttatttgttctgtagtatacaaactaacatcaggaataataccagctcttactactacactagcatccagtcgtttaccacaagcccatcttcttaggtcatcgtatctataaccttcaccgaataattcaatacggcgctctcttctgatttcacgaattaaattagcattgctacccttgatgtttggatattctttttccagttttggatcagctactgggttaacggtcaatggatgattgaaaccaacgcgctttctaagttcattgattgttcttccaagttctgtattatccagtactcctaattctgctccggcttcagcacggattaaaagaatttctccgtatctgaaaatgggagcgtcaatgctacctttatggtggtctgaagaaaactcagatgttttatagaattttgcaatagcataacctgtagaagaagaaccatccgcaccagttgctacgatattggcaatattagctgctttaccatgcaaatagtatgtatactctccatctttcggggtagctatggtttgcaataatctaggatctctgttttccagttccgcaataattcctgtgtgtgtagtatgtccttcacatccacataatgagataggttttcctgttgttgcacataagtaatcttctactgcatctcggcttgcaccgataggagtttcacctactccaatttgtctggtaacattattacctttacctaaagacggatcatattctttagctaaaataacctctgaattattattatagttttcttgtgtaaataattcatgatatgcagttttaggtgagcttcctttaaatatggagtagccatattcttctttcattaattcgcctgcagcatcatacgcttcctgcaagaattttacgtcgccttctatgttatggtatcttctccaggtaccttcaaataagcacattcttgcttttaatgcaatagctgcgtcttttgaaactcggcttactcccactttagatttaggagaaagcagattgatggccttttcaatatttaaaagtaagctgtcagctacaagtgttcttgaatcacgtcctttatacatttcctcatcaccagggttcaagactgtggtataccaaggaacatcaccatatacacttaacttattaaagtaatctaagcatttaaagaagtagatttctcctgcgtattgattcttttcagcctgagttgctggagatgattgatagttcatcaagaaatcattgcatgcacgtatattttcccattgccactctgtatctttagcttctgtaggagctacatgcaagccaaaactttttacgttatattcccatgtaaaaatgttgtctgactcaaattctttttccagcattccaaaactatatgataagggatcaccatgaccttttatcagttttgggtagaagttgttacagtattgctggagggcagtaccagtcgcagtagtaaagaactgatcttttgttactgagtctaacggctccctgtcaaggtagtcacaactttgaaagctaagtgccaacaatgtggcatataatatagtttttttcataatacaataagcaaatttagaatgtaacattaataccaaatgaataagatcggcagaatggatatttcgtcattctttcttccaagctaccatcatcttttgtatctcctgtagagtctggatccaagtatttatataagccggtagcttcccataagttttgtccacttgcaaagactttcaattgtgagatacctaatttagatacccatgatgtcggtaaagtataaccgattgtcaaatctttcaagcggatataagatgcgtcttgcaggtattttgtttgaatctgacggcttctcgttgtatttgtgggtactgggaaataggcattaggattggtttcactccatacgtcatttatatgggtttcatttaatgcactccaccattgacctgtgtatccccagaagactgtattgttatctcctaaccataagtctcttttcattacaccttcaaataaagctcggacatcaaatcctttccaatttaatcctaaattgatattgaagcggtatctcggtgtttgattaccgataatctttttatcaccatggtcattcagctgattttttccgtaagtaatgacaccgtcaccatccaaatctgcatattttatgtcaccaggaatccaggtaccactgatttgtttctgacgtactttcattgcttcggcttctgcgtcatctttaatgaatccttctgttacgtatccccagatgtctcccaaacgttgaccttcataatagtcaccaagatatccggttgggttatcatatttagtgatagttgaataactgtctgaaatgccaatgccgatattataatttaaagtagaaccggctacattgttgatattatcattccagttaagtgtcaactcccaaccgtttgtccgcatattggctaagttttctttacctcctgtagatcccatagtagcagggtaggccttagatacgaccatatcatttgtataacgtaagaaataatcaaatgaagcagtcagtctgttgtttaataatcctaagtctataccaaagtttgcggtagtaactttttcccatgttacgttgttgtatgccagtgaagcaggagtaataccgttggcaagtttgccgccaatcaaataatttagctgttcgaatcccatcaagcttaagaagtcaaagttgctgtttgttacctgatttcctaagctacctaaagatgcgcgtagcttcacattgtcgaaaatctttttagctggttcaaagaacttttcttctgaaagtctccatcccaaagaagcagaagggaagaatccccagcggctatctgatgcatattttgaagaaccgtcataacgtccgtttacttctaccagatatttcccagcatagtcatagtttaatcggaagaaagcaccttgaactgcccaaatggtagcttcttcttctagtttctgtttggtgtttgcccagtcaataataggagcatcattcaggtataagtctgtaacatagccataaaaattgctggtttttttactttcctggttgtatcctaccatggcagtaaaagaatgagatttaggcaattcaaacttatattcagcccaaagattcaatgcctgataagtgtcatcatattttcttaatgaaactccgttgggttctcctttggcaatctgtgatccatctggttgtttctggtaaatcgttttattatgagcgcgttcatctctgaacagccggttcccagtataatctcctttaatggataatccttttaatggagttaaattgaacgatcctgtataccatatatcgtcatatacattctttttgcgtccggcttgtgccagcattcctgcaatattaaagttgaagtttgagcctgctacagcagcaaagtctccatctggcaagtatacagggatgaaggggaatgcacggtaaacttcataataaggatcctcacttgtataatggtttgagtttggttcattcacttcacttctattatattttgttctaaatccaatttctaaccagtctgttacttttgaagtgaaattaaatgacatattgatacgtttatatgtatctgtaccaaaagccagtaagccgtcttgccctttgtatcctaaagaagcatagtatgcggttttttcgctaccacctcttaagctcgcattatgttgttgcataaaggctgcgttcttatagaagatatccatccagtctgtatttccggcgtaggcccattctccgtttgctgtaaatttatttccttgtgtattttcccatgctgtggggcgagtagggtctttcatataggcatctacagctgcgattagttcgtcgctccagtattgggttccactggtattcttagattcattattcatcgctcttagccattgatctgccggtaagctatggggtaatctggatggtgtagaccatgaaaaattattattgtagttaaaagtgattttctctcctgtttttccttttttggttgtaattaacacaactccaaatgctgctctggcaccatatacagctgctgaagaagcatcctttaaaacagaaatgctttcaatgtcttgagggttgattaatgagatatcatttgtttctacaccatccacaagcacgagagcagaacctccgtttaaggatgttaatccacgcacgttaatgctagtttctgcatttggattaccattggcaaatgaaatgtttaagtttgggataacgccttgtaaaccttgagctagattagctataggtctgtcttccagtacatcactttcagccattgctacagaaccagttaggtttacttttttttgggttccgtaccctactactacaacttcttccaatgtttttgtatcgtcttctagtacgactgaaattggagttcctttccatatgacttcttttgttaagtaacccacaaaagaaacttgaattacagctcctttttctacatttggaagctcaaaatttccatcaaaatctgtgatggtaccaattgttgtacccttgaccaatacagatgcaccaataacactttcaccggacgcatcttttacaactcctgagcacgtcgatttttgttgtacaatgttagaattgataattacggatggttgctctgcatacagcagttgtgtggttccacctacagttagtagtaacgcacctagtaatttcagattactcatagttcttaaaattaaggtatatagaatttattgattattttcaatagattcagtattagattggttaattaaattgcacatatttctatattttgtataggaatatattttttcgaattcaaaaataaatatatatttttaaatatccaaaattttacccactatatattaaaagaaattgttcgttttttctatttctagtatgaatattaatgattaataaatgtggaggagttattctattttttgaacgtttcagatattcttaagtatggggaaataatttctttttatagcatatatctttttcaggtagatctgtcattagtatattaagctgtcatttttccattattaaagaggttaatatatatctaacatcattagtgtccactaaaaaattatagaagttctttgaaattattgaaattcaatttgttacaggagattttggggagaacggatttgaatttacttttgtggtaattttcagaccgttatgcataaagacccatatatttttgcccaattagttaagttccttgaccgaagtaaattcaatcgtatcgttacaaagtatgaaggcgataagtatatcaagagctatacctgttggaatcagctgcttacgatgatgttcggtcagctatccaatcgagatagtcttagagatttgattgtggctatggaagctcatgctggaaaactttaccatctcggaatcgggaagtctgtaactcggagcaatcttagtaaggctaatgagcaacgtaactaccgcatcttcgaagagtacgcaacattcatgattgccgaggcccgcaagcgtagaatcaataaaatattcgaacttgacggtcatgtttatgcatttgactctacaacgattgatctgtgcctgtcagtgtttgaatgggctaaatttcgcaaacataaaggcggaataaagttgcatacgctctacgatattgaagcggaagtgcctgcatttgtgtatattacacctgccaatattcacgcttcaaaggctatgcctgagattccatatgaatcaggagcgcattatatattcgaccgagggtataacgatttcagcaaccttaatacaataaatcgtataggtgctttcttcattgtacgagccaaaacaaatatacggatcaagcctaaaacatggaaacgaagattgccagaaggtgtagtatcggatgtaatcggatgctttacggtttataaaagttctaaggattaccctgaggaacttagaaaactcatcattgaaaatcctgaagacggtacacgatacatcttcctgacaaataatcttgacgcatctgcagagtttatatcatcgctttatcgaaacagatggagtgttgaactgttcttcaaatggataaaacaacacctcaggattaagaagttctggggaacatcggaaaacgctgtacgcatacaaatctattgtgcgataatcacttactgcttagtagcaataatccaacacgatatgaaattagaacgtagcgtctatgcaattctccaaatactcggaatctctctgaccgacaaaacacatctcagtgacttgtttgacaaatcgaatttcaaaaatgtcaaagaccgatatgattcaagtgaaccgaatttatttaatttttaaccttgtccatttttagtggacagtagtgatcggatataattaatataggctgtttcatatctatgttgaaacagcctatgtaatgtttacctattgaatgttatctcggaatgaagatgcaggaagttggtctttgttgactaagtttgctcgtgtaaaaggacgccatccataacgtatatattgggggttctttacctgattagtataaaccttaattttattcccttcaattatagcttgggcagggaaatactttccttcgtgttcggctaattcaaaaccggtaagaggatttccgtcagaactgtgtaatccttctgcataatcaaattctataataacttcattatttttacttattgcttttttataaagaggaccggatgggagtaaagaataatgataagtttgatttaatgcccatctagctaaacgctctccaataggacgtttatctttagggtgtacatccagtgaatcacctttatcggaggagacggccataccagtatggggtaattcattcattaagcgtcgttggctatctcgaaaccaggtccatgagggacggtttaggcttgaaagttgtacaaaataaaaaggcatgtcagggttattccagttgtctctccatccattaactagaagcttgaataatctataatgggcttccatattgtgagcattcgattctccctgataccagattatccctttgagaggatattgttgtagaggaagtatgccggcttcgtataaataacaaggttcatacgggtgtcgtttgaatgtatttgtactttgttttaaatttaataaggctctttctctagcccagccctggataaagtcgttgttagtccagtctttcagtattgcaggaaaatacttttctaatgaatgacgatcaacccaggattcagtggtagatcctcctacagcgttgcagattagtcctacagggacttttaaactgtcttgtaacatttttccgaaatagtatgctacagcagagaaagttgcagcggtattgggggtacattctttccatgaagtagtctggtaatatagtaagtgattaacagaatcaatagcatttgtaggccattctgaagcattggtctcccatttccctttcatatgaaataaacgaatttgagagttgtgtgcttgggatgcagctgtagggccatcttgggtttgttgcaacatgaactgcatgttagattggccagagcatagccatacttctcctgctgctacgtgatgaaaagtatgtgattgctgtggagtttgtatggaaagttcatagttatctccagccttgatcggatctaagattacttcccatttaccgtttttatcagtaatggtttttttcttttgtccgtcaatacttactgtgacaggagttttcgtattagctgtgccatgaatacgtagtggggtattacgttgtaataccatataatcagtatagagaatcggtagtttaagccctccataatcgccggtgatagctgagtatgctgtctgagccaaaatatgtgctccttcttcattaggatgaatggcatcaggcaataaaagagggtaagggtataatggggtatggaaatctatgagctctgcctgacttatttgtgcaacgactttaattgcttcttgaatttcttcatgccattgttgggtacctgagataaaacgaggatgtcggtcagctattggggtaatgtatgccaatagaatgcggcattgaggattgacttttttaaaagactctattagcttcaaataatcatgaacgaactcatctctgtagttaggccagtttcttggatctgtgtcattgataccaaggtgaatgactacaatatctccagaaaaatcaagagctttttgatattcctcttgttgcatataaggacgatgtccatgtgctagtagagtggcgcctggctttccaaaattacccacagaatatttctttcccaatagcttctgtaattgtgcaggataagagtctgcatcacggtttgtgatgccagtgccatatgtgatactgtttcctacacaagcgacttttattgtttctgtagcttgtatcggttgccgcaaaaaggcaaacagccatactagtgaaattaagatagattgtttcattttatttttttagataaggggtaattatttctttccataacatgtaaccttttcctaaaaggtgtagtccgtcattggtatattctggtttcatttgtccattatcatctacaaagtgagtgaaaagatcaatatatttcacattttctttttggcaaatattaaaaatagcctgattaatgtcagggatttcttgccaatgggaggtatgttcttgaaacatgttgtattttgtggtaacaggtaatacactttgtatcaagatttctgtgcacggtgactctttttttattttttgtatgatttgttgtatatcagaggcaatattattcggagattctccttgaggaacgttgttgattccaatcattagaaagatttgtgcaggctttcctttaaggaggacagagattctatcatagactccccacgtagtatctccactgattcctctatttttgacatggggattttggaataattcactccattctcctccgtcggttatactatttccgataaaaagaatatcatccgaacttgttgggagttgttcaaataatgaagctcgttggtagtaataagtagaatattttctttctgtttgtccgaaagtagataggcttactgctaagcctatgatgaataatattattttgttcataagtatatagtattaaacagattaaaattattttttattgggggaataaataatattgtctatttcttttttcccgtcaggagctacaaagacagcattgaacatccattttaccaatctgacttctggggttttaaactttcctacaggtaacttgaggaagagtttgttccatcctttttgtaaagtaacttgtattggcggacgggaggctgcattttcattcattaatggaatttcgtttgatcggtctttatgggtattcctccaaacaggtggaagtagttctttattattcagccagacacggctacttttatagtcccatgttccttgttgtggggctaggtcactttcggaacgactgtagttctgaaaatccaagaatagtcctacgtgttgttcgtaaggagaaaatacccaagtagtagcataagctgtatgattttcctttggagaagtatagaacccaggaattaaatctccccatacatggcgtaagtatagtccggctccataaatgatgcggctttgataggtttttcctttatataaatagctttctttttcttccttttctggtggaaatgaacgggtcaaatccccttcgtttgggaatgcctctgtgatgcgccataccacattggtttgtttaacatagggaaaaggttcgtttgtgaatgtatgttctttatgccaaagcattctattttcaaaatcaacaaactgagtatagattcctgtgtcgtttttccataaaaggttagtctggtcgtcaaaatacccatatcctcctcctttccagcttcgttctgctagagccagcatgttggcatatagattgttttctgcaacgatttgtttttcatcgctgagataacggtcgttccatatagccaaaatacttcctgcaatatcttcgtttcccatatcttgattataaatgcggctattgtataaagctaccaaatcagcaaaaatatcaaaatgattaatgtaatgatagcggctgtcgattgctggaatgccagactgggcttttcctcggtaactccatagctgtgtcatgtctatttcgcctgcttgatattgccaacctgggttccatgaaatgactttctttcctttttgtcgaatataggttaccatttctggaacaaattgtgggtttataaattgtacttcgtctgtaccaatatgtatataaggtgtatcaaatgtttcacacacttcatccatgagttgctttagaatagtcattcctttttcactttgcatatcagtttggaaagttttgacaaaagcttcactatgtccgggcatatcaatttcgggaattaatgtgacatgccgttgcttgcagaaagccacaagatctttggcttcttgtagggtgtaatactttcctggcatacgactcatgttttcaggagcattgagctcgggatatatcttactttccagtctccatgcttgattttcagttagatgccaatggaatacgttgattttaaatttactgagtaaatcgatttctttttttaattctgccatggagatataagtacgtcctacgtcatgcataaatcccctgatgcgaaaagcaggccagtcaataatctcacaggtaggaagaaaatgatattcattacttttgcaagtcaattgttgtatagtttgcaaagctctgtatactcctgtagaagaggtcgctgtgacatagatttgtttttctgtaatttttagtttataaccttcatttgaattaataggaatttcaggtaggttatctataatgctaattttaatgatcttatcggtttgtacagaggttgaggatgccttgttgccttgtaaccagtcttcccattcttttgatatactactttctgttgtttcaagatgtatttgatctaatattaattgttttccggtaaaagttattttttgcggatagggtagaagagggtaggttgggttactccaactggataaccagatacagaatgttgctatgaaaagggaaataagtttcatgttatttttcatgttatagactattgaatattggtaatttttaaagtccatgcatatttacatggcatcttcaaaaatgttatttgaggcaaatatacgataagattttgtcctttttgttcccatcttaatttatccggataaccaagtagattaatgattgtatgtgaagttgatttaacatcttttaatgttatcttatcaggatagtttgttaggatagcatataaattgtttgctttacaggtaaaaaatacttcttgtgtagcatatccaggttcagggttaactgtttgttttagaatagcattcccgctgacataatatttttctccagacttccagtcacgttttccttctgaccattggcaattctttttccatggtcgagtattgtagatgccttctccattcactttaagccattctcctatttgaagtagtcgttcttgcataattggaggtatttttccttctgctgtaggacctatgtttaacagaagatttccgccctggctaactatttttattagtgtgtggatcaaagcttgggggactgcataatcttcaatgtcttcaagtttgttatatccaaaagaaaaccccattcctctacattcttcccaaggcttgtcatattttttatttgatgaactatattcgcttgtataaaagtcaccatgcttgccatttttgaattttgcccatcggtcattgataacaacactatcttttacttcggaggaagaatataaccatgcaaagaattctttagttttccagatttcttcgtcgtagttatctggtccgtcggcccaaattaaatcaggcttatattttgttataaggtcttttaattgtgggtataagtgttgttccacatagataggcattgtagaagttgtgtaaaaaggattgttccattctcgtaaagaaaagtaacaacctactttaagaggggtttttcgaattgcttttacaaattcttctaccaaatttctgtgtgcacctatttccatactattccatggtcgtctatggtggaaagatgcttctttgctatcccataaggcaaagccatcatggtgtttggttgttaatactgcatatctagccccagatttaacaaataaatcagcccattctgtagcattgtaatcttgtgctttaaacaatggggcaaaatccatataggtaaaatcttttccatagattttttggtggtagttataaatttcgtctcctttaaaatctccattgccaaatagcgttttattatcaagccagtattgataccattcagcgtaagttcctttaggtgaccatgctggtactgaatatagtccccaatggataaatataccaaatttagcattctgaaaccatgttggaatagggcgtttgtccaaagattcccagtttggggtatatatggtttgtgaaagccctgttgttaaagtgataaaaaagaaatagattccgaaaaagaaggttttcatatagtgtttatttgaattggattctaaataaaataaagccttagaattctctttggagaaaattctaaggcttgttatcaatctttaataatgagatttagtatccaggagtctggttcaatgcactattttctcctaatgtattttcatcaataggccataatagacgttctgaatttgcatttgaatatttagtagcatactcatttcccatgagacgaatatcataccagcgttttccttcgaataggaattctctcattctttctttcaaaattgcttcaatagggttatcatcacttccaacgaatctattgttggcatagaaggttgcatccttatcattggggtaggctatttcgcttctatgttcattgaagtatgtagttccgtaagcacgttcacgtacttcattgatttcttgagtaatatcctctcctaagaaagccttggctgtagctaacgcaagtagacaatctgcatatctgtagattggatagtcatctaaccagcttctttgagcatcaccatccaataatactccttggaatttataagcgataggtgagttgaaagaaagagttccacttgtattgtctttattataaataccttttatggaaattgattttctagtatctccttctcggaataactgagtgtataaatcttgttcaacttgataacgaattaatccactcatgtctgccatttccgtttcattgagtagggctccattttcatcgtaataagtaccaaaatttgcctgattcatgaccatcgttgatctatattggtcattccagaggctgtattcgtttcttccgttatgtatagcgaaaatgatttcgtcattttctttattgtcgtatgcaaatacttttttaaagtcgttcaacaatcctacaccagctgtttttactgccattaacgcattcttagctgtagtgtaatcactttctccgccattcatttgttttccgctccataagtaaacttctcctttcagcatcattgtggctgcttttgaccaatagcatttgccgtatttgaaagaatagtcatcaccaaaggcatcttctgaactttggatatcttttttgatttgggtcattacatctgctgcagatgaagcggctttgctaggattacctatatcaatggagttaccgttagtataatctaactggagtactacatcaccccatgaacgtagcaaatggaaatatacataagctcttaaaccataagcttctcctagataatagtttttagtacttgcatctagtaaatcagtagattcagtatgactaatcatcaagtttaattgattaattaatacatagaaatctccataattactaatcacagggttggctgcatttaaagtgttgtcaatcattctctccactccttgagtagcttccccagtgaatggattggaattgtaaatatcagcgcgaggttctcctaattcgaaaatagtataagatctttcgcgaagcagaccgtgaagtcccacattaaatgcctcaaattgagccgcatctttccaatagtttacatcagtaatactactaacaggttccatatccaagcaaccagtaaaagatgttgccaggcatccggctataatatagttgaatatttttttcataattgttgttttttcagaatgttacagataagccaaacaataaggttctaggagttggataacggccattatcaattcctcgtccgtaaactgtagatacagctggttcaggcgatacaccgtcatatccagtaatatagaatagattctgtcctgttacatatacagatgcatcttgcatacctgctttaccaatccatttttttggtaaagagtagctgagggtaatctctcttagtgccagataatctcctttttcatagaaacgtgaactattattatccacagctgtattaccattgttagaacgagtaatgtttttcttgttcaactggtcagcataagtgaagactggaagatccgtatctggattcgtttcactccatgtgtcatgaactttatctatgatattaaactgtccttgatactgtcctaaagaacgggcctttaagtcgttgtaaatagtgtgtcccaaagcatagtcgaaacgtgcgtataatgaccagttcttataagataaggtcgttgagaatccacctgttactttagggaatatattaccaactacagcacggtcaaggctgttaatctttccatccttattaatgtcttcccagcatacatctcctggttctatgggtttccatccgtttgattcagcataagttacacctgtctgtgggtttatttcattggccatacctggtccatacaagttggcaacttcgtcaatgaccatgttggcgttagcttttacatcattccaatctctaaagatatgattctgcacatagcctaccatgtcaccgagttttccaccttctctatagccgccaatccatttggtcggagtctctcctgtttcagggttgtagagtccagctgccacttcataaccatcaatctggttaaatggtttgtcacttgtaggtaattttaaaaccttgtttgacactgaagttaagttagcagaaacttcccagttaaaacctttagcattagatagaatattagctcttacctccatttcaaatcctgagttacgcaattttcccaagttggttttcatacttgaaaaaccagtatatgcgggcaggttcacatcggttagcaaatcatctgttgttctgttgtaatagtcaaagatgaagcttaaccggttgttgaagaatcctaggtccaaaccggcttcaaatgaacggctctgttcccatcttaatcctgtatttattaaagaagagttgtagtatgcagttgcaccatcgtaattaccggctccaatctgcttataaattccgtaaatatcaaagttcccgataccatttacgttaccgtttactccataacttaaacgtggtttgatgttactgattacttctgaaattttagattctttccaaaaatcttcttctgtgacattccatcccacagaaactccaggaaagaaaccccaacggttgtctttcaatcgagaaataccgtcgtaacgagctactaatgaaagcagatatttcatttgatagttatagtttacacgaccaaatacggatgcaatccgataacctgttttttcagacttggtggatgtacgtgatgctcctgcatttagagtcggaatatcatctgttggagagttctgagttttggcctccatcataaattcattataaccgaaatattcacttcctaccattacatccaagttgtgcttgtctttgaatgtatccttataattcaatgttccattgacctgaatctgagtatagcgttctatctttgcactagcatcacgtgtgttagttggtgtagatgaggtttgaagctggtatgatttattgaatgtttcatattgataatcataatggtaaagcgatgagtttccgctgaatgtcagttttttaggaataatatccaaatcgaaaccaaagttatatgtcgatttacgtgtaccatcttcactagtcagtttgtctcgataatattcaggattaccatcacctgttccccaacctgatgcaggcgaaccatcttcgttgtatggattccatgtcggacgttgtgagcgtgtacgatagaataattcataagaaccaatccataatgatggttgctgtgaccatgtataggtagcaccggctttcacatttaagaatgggaaaattttgtaggtaccgcttacagagccgttgaaacgtttgtacccagttcccttaatctgaccatcttcattgtaatatcccatgctggccatgtaagtacccttatcatttcctccggtaatatttacataatgatcttgtgtcaaggctgtattagcaaaaacggcatcatccaactgaccactataatccttataaagaagttgtttaccttcataatatgggtcatccataactagccaaccttcatttcttagatgagaagtttcatcggttagatattttacgtcgataaggtcattttgtgtaccatatccagtttgagtatctacgcttgctgctcccggtacgttgtttgtataacgtttataacccagacggttatagtaaagataatcgtgggcattacagaaatcatatccgtaacgtgcaaagtttacacccagtttaaatttatagtttactgaagctttacctgcttttccactttttgtttctacaaggataacacctccgttggcacgtgcaccatagatagcagtagaagcggcatctttcaatacttgtatagattcaatatctgaagggttgatgtcactcatgctttcgcgaataataccatcaacaacaatcaatgctttactattaccaccggtaattgttgctccaccacgaagagtgatatcaggttcagctccaggctgtcctgttgtattgataactcgcaaacctgttacagaaccttgtaaagcctgtcctgcgttactcatagcagcatttttcagaacttgatcatccatttttgaaatggccgtagttaatgcagctcgtttctgtgaaccaccatatccggttacgacaacttcttccaatgtttggttatcttctttcagaatgatgttaatcggagtaccatcccattttatggtttgtgtaatatatcctacgaaagaaatttcaataacatcccctttctttacgtttgatagagagaagtttccatcaatgtctgtaattgttccatttgtagttccttttactattacagaagctccaatgacagattcgcctgttgcgtctttcacaataccttgacatataccagtttgttgtacaatgtcaatttcagattcattttttgataagtccgcatatgccatacccgtagataaactgcctagtaacagccacataccgactgacttcatttttctattcataattcatgcatatataaggttaaagtttgcgattgatgattcttcagttaacttaaggcctttttaaaatgaattttattaatacgtctatttacatgtggcaaatatagaaataaaaatttgatgtcacaattatttgataaaatattttatgaaataccgattttatttgtgttgtatttttgtttttaccgatagtttataaagttgaatttcttttattgtgattctgattatacgtataatgataagaatgttatttatatatgctgatattcagcaataaaaaaggggatatcataattgatatccccttttttattgaaatctttatataataaattattttataatatctttcagtttaatgctttggaaagtcatgtgagctacactgctttcatacaatataccgatagtttctttatctatcattgtcaggcaggaatatccccaattgtatccctcatctaacagaagctgatgttccgaactccaggtatttcctccatccatgctgattttaatcgtcatgtctttacgggcatttgtagaattggggttggagaaaattaaaaggtctttacccaatacattatctttcgcttttacactgatcagactggccatacatacgggctctatcaaagcagtacgggatgattcgtgttccttccaagtcttacctaaatcttgtgtggtataaacggcccggcttcctcctcggttatctctcatgttcagcattaaagtgccaggttcaagctctgccacttgtgcttctgtggtattagtacgtgcatggtggtgtatggtccatgtttctccacggtctttgctatacatgatacccgcattggggattcgggttttgtcgataaactgaatggggaataccaatgtaccatcttccattgtgatgcctcgtcccgggccttgcaataagaaataccattccggaagcttcacttgttcggtaatattgattggttcagaccatgtttttccatcatctgtacttttagcgagtaccaattgagcggtatggttcaagtccattccctgatgtgaactccaccatgctctttggttacccattccgtgtgtccatgccgctacaatccatacggtgttggttttggtgtctaccaagatagaagggtcgcctacaccattctgagctgaaggaagtccaccgtattctttgaatgatagaggtaaacacattttttcccatgtttttcctccgtctgtactgcggctgaggcctatgtcgatatgttcctgcaaatctacactgctgttgtaacgcacatcgtatactcccaagagagtacctttatttgtagtaaccagccctggaatacggaaagctgctgaaccgtcatcacctgcatggcgaactcctactgccattctttgtacgactttctgttctgtcgtattttttgtgggtataattttcccatcaccttttacctgagttacttctgcacagatttttgtgtgtagtgaagctgttggttgcatttcgatactgatccagaagaaattatatccaggaaagaggttctgttttccttccagtgtcagcgtattggttttaggtgttatttctgccttttttatagaataagatggattagcagaaagggtttgccccggattgttgctggaaatgtattctacgggtgcaaagcgtttttttcctctgtcttgtggagcatctgttcctccataatacaatttaatagctttgatttgtgacaaaggtacgttcttgtcgaaggtgatagtgacattgtcaagggtctttgtttctttggcatcgagacgcagataagccaagacattatcatgtctttctattaatatcggtacttgtggggttttaacaaagacagtatcagcagcgtgcagaccgatggaaagcattccgatacataaggataatagttttttcataatgcagttgctggtttagatttttactttagctataagttttcttatttttccttctccaattacaggggcatgtgggtcttccggatatacaatggcaaattgtccgggaagcaaatcaacaaaggttgtaggtacatctgaatagagtgcacaatcaccttctttctgatacgcttgtttcagttggtttacatcttcaatggctttccaaccgatacgttctttcccttccaaaagaatatgtatatcaatgtaatcacgatgtacttccagaacctgttcagattctttcacgcatgtggggttaacgttgttgataaacaggttatctccatccagttctattcttccacatggtgtatgcaataagtcgtgactctttacataatcgaacaattgtttaaataaaggatgtagcggttcaattctgctactattttgtaaattggaaacaatcataatatataaaagtttttagttattccatattgtctgttttaggacgtaagaaatacaactgtacgccaagagcaatagctaccacgatagctagcatggcaaaaccggctcctaaattgccgctatcaccccatcttcctaaaagatgagtaatgaaagcaccggcagatacaccaatcatattcatcactccataggcagtagcccgttgtttgtgagatacaaactgacagaggataggcatgttattagtatcaaagattccataaccgataccaaacagcagcccggcacctactactgctaccagattatgtccgaatcctaataaaagtagtgatggaatggtcaatcccaaaccgatggctccggtatatacacgtccgcgtagatttttctgcacccatttatccgataaaggaccgccaataagaactccgatgaatgaagatacggcgatggttatagtagaaataggtccggcttgtgacatgggtaaatcaaggttttcagcaaacaaggtcggaagccagtttttggtagcccacccgggaaggcttggggctgcaaagtagagcaagattacccagaaagctacgttggttagcaaggattttagactggtaaagacgctctctttctctttttgtggattggcttgaagtttttctgtaggaagaatttctgtttttttgtcatgtaaaaataacatcagaattacggcataggcaattccgatgataccgaaccaatggaaagtggtgtgccaggaaaaggcatcggctacggttgctccgaatcctccgatggcttgtcctgtgtacaaacctgtcatatggatacctacggccaaagaacgggattttccagtatgatagtctgcaatcaaggaaagtccggcagggatgtagagtgcttcgctcactcccattaaggcacgtagccagacaacctgattgaatgtttcggctattcccatcagataagttacggaagaccatacgaacaaacttccaacaatcagccatttgcggttcaaacggtcagctatgacgcctgaaacgggactcatcagtgcgtaaatccagagaaagattgccatcagatagccgaagttggtagctgattgcagttctacaatgtcaacctgcatcgcatctttcatggtgctaagcatttgtcggtccatatagttaagcaatgccactccccatagtaggcctactacaatccacggataaatttttgagtttttcatatattatggttattcagttagcaatgtaacttgccggattattctccggcaagtatttctttacataatgtatatccttttatcatcattcttggaatatggaaaggacctttaaagaggttacctttcgcaggttgagctactgtaccgtcacgatgcaggtacccgtaccattctccaaattcactgtcagggaaatgagcatacgtccaatcactgatttgtttgtgacgtttcaggtatttctcgtccttggtcagtttatatgcatataagttggcaatgatggcttctgtttgtggccaccagaatttcatgtcttgtgaataatcctgtggaggaagattcttgcaatccttgaaattgatgatgccaccatactgtttgtcccatccccattcccaagaccagtcaagaatggttagggccatgtcaatgagttctttgttattgttcatgttacgtgctacatcgaacaggaaccaagaggtctcgatacaatgtcccggattgatggtacggccattcattgtatcgataaattctcctttagggccaaccatttccagcaaagccttgaattcagaatgcatgaaatagtttttcaatgcataaatggattcttcaatctgtgcatcgagttcaggatctgaaattactttcttgatactggaagccacattgaccataatcatggtaatggaatgtccttgtgcctgaaccgtaggtaaatatttcggttcaagtatacctggagtattcaggaagtggcgcatgcgcttgaacaaatcaagtgctttttgggcatattctttattaccggtagccagtgcatattccgacatggcgatggcggcaaaactctcagaaaatacatatcttcttttccggagcggagttccgtctgctgctacctcgaaatacattcttccatcagtatcgaagcaatgcttttcaataaagtcgagtgtaagcttggcagcatccagccattcaggatttttttctatattgttatatgcgtacgagcaaatgaaagcaaagcgtccctgaaaccagaccgatttagtggtgtcaataagttgaccgttacgagccacgcaggtgtatatgccaccgtgttctttgtcaagaccattctttaaccaaaatggcatgatgttatgggtgagatcttctttgtagttctcagcccaatatttagcgtaagtttctatagacataagaatggatttagaatttgttgcaacgatcaaagaagttgatggcttccagttctgccttcatgcgtgcttcttcttcgtctgtcatattttggaacggagtacggttcttacctaaatccagcccgatgagcttcatgattcgtttaccaccaacgatattaccgcggtaatggcaaatcacgttgattacatcctgagagaagttctgcagttcgcgtgctttttcgatgtcaccagctttccatgcgtcgatgatgcccaccaggttgattccgttatagttagttgtaccgccgataccaccttgtgcaccacccatagctaatgatggaagaattgtttcatcctgaccgtgcagcatgtcgaattttccgttcttgtacaagcggcactggttgtattcgtaaatgctttcgtatgtatatttgatacctgcgaagttaggaatacgtccgtctacagctttcagtaattctaccatcggtaagaaagcaccattgaatgccggaatgtgataataatagaaaggaagatttggggctccagccgcaatttcttcacaatatttcaccagctcttcaatgcgaccaattttcgggaatggaggagccatggcaccgataccccatgcaccaatcttctgagcatgttcggccagcattttgcttgcttttacacagcagcttcctacgtgtacaattaccttgaaaccttcgggagcagctttcacccattcttctgccagtttcatacgttcttcttcggtcagcatgtagccttcaccagatgaaccgttgataaacacacctttcagtccattttttgctaacatttttgcataagcagaaatgggttcataatttacttcaccattttcataaaatggagtaaatggggcatcaattaagccaataatcttttccataatattatatttaataaattagtttatttaataatcgcaaaaataaggatataatttttatattacaaggttttatgtgcttattttgaaattattcttcttttttgagaggataaactgtaatttttggagttcttatgcctggttttatttctccgcatatcatatataaataaccttcacgatgtagcaggatgcctcctgcacgtgccatacctgaaatatttgtttttatggtccatgttttatgggtaaagtcataaaatagaatatcattattaaatttgtaccaagagggggcgtgagttaaataatcttttcctgcttttccatccagtgcgtttttgaagatgtgataattaactcctcctgtcaggataagatgtgtgtctgtctgcacaccgctacctcctgccatgcaacgtttttctttgtttccctgataaggaatgtgagaatcgtattcccaacggtcagtttttggagtataacataatatgtcatgtgaaaggatactggtagaagaatccgatggggcttgaaaacctccaatcaaataaagcttctttccatcattgaccagaataggttgtactcgttgaggtccagggaaggaagataatttttgccatctgtcacatgtttttaagtccagtttgtataatgcgttttgtcgcagttgttgatttcctcctgtgatgtagatacattcattcaacattgtggcggaggcgttgtctattgtttcaggaagagaaggtagctggtggattcgaaagctttcagaggaaggatctttttgaatccgaaatacgctggtcagacaagaatctgcattcattcccccaatgcagactagtccctgaggtgtttctacactgcaaccataagctacggaacagggaagatcagatattcttgtccaacgaggagatgcggtatgaatatctagtgcatagcattgattgtaataggctttttcccctccttcggctgcaggaattgtcgggaaattgcaacctccccccacaattagccagtttcttataaagccggcgaaaggtgcagatacgccttttgtaatagggtaatcgggaagcagcgtaggaacttgtgccatatttattgtgcattgggcaattagtatgcctaaaatcaaaaataattttttcataacgatgtttttatcaggttaaggttgtagaaactcatgtatgctaaaataagcataatatttaaaataatgcctatttaatgaaagattttttgagagcatcctgatataattaatactttgttttattgtatggtattattaattttattattttagcagtcctattatttggtaaaagttaataagggatttctaaatttaaaagccttaaatataataatttattaatgaagttgtaggaactaaaacagaatataatatagattactataggtttaaccctaaatgctgtgactatggtacaaagattaattgaaggattaggaagtggaacaaaaaatatgcttacccagaagcgtatcattacttatctgatgcataaccattcatctactattcccgatctggcaaaggatatagacttgagcattcctactgtgaccaagtttgttatggagttggtagaggagtggtatattatgaattatggaaaacaagagaccagtgaaggtagacctcccaatctctatggcttgaatcctgattctgcctatatggtaggagtcgatatcaaagcttcttgtttgaatattggtctgatgaattttacgggtgatatggttgatattcagatgggagttgaatgtcgactttccaatacattagaaagtctggaagaactgacccggcatatttgtaattttatcgataagcacaaaactatcagagaaagaatccttcaggttggggtaaatatttcaggatgggtaaatcctgaggaaggatatagctttagtatgtttaattttgaagagcgtcctttagcagagattctgggtgagagaatagggactcctgttagtattgataatgatactcgtgcaatggcttatggagaattattgaagggtgctgtgaaaggagaaaaagatattgtttttatcaatattagctggggattaggatccgcttttattattgatgggaaaatctatacaggtcgttccggcttttcaggcgaatttggccattttagtgtgtttgataacgagataatttgtcgttgcgggaaaaaaggctgtctggaaacagaagtttcaggttcagctttgcatcggattctttgtgaaaaagtgaagagtggtcaaagttctattctttcaaaaaggattcttacaggagaaacgtctctcacattagaagaaattgtagatgcgaccaataaggaagatattctgtgcatcgagttggttgaggagataggtcgtaagttaggtcgttatcttgccggcttgataaatttgtttaatcctgaattagttgtaattggaggtactttggcattgacggaggattacattctgcaacctataaagactgctatacgcaagtattctttaaatttagtgagcaaagattcagcagttgtattatctaagttacaggctaaggctggagttataggagcctgcttattatcaagaagtaaattatttgaatggtaataataaatttattccccgagcgttactaacacccggggaataaatttatttttcaacaagataagtgtaggtttcaaatttatagtatccaagctcatcattttcttcgtaagtttcagatatgatgagctgatttccagagaagcttagtgtggcaaattcatcgtcataccactcattatcccagctgtaatagatggttccagcagattggtttttccatttccatgatgaaattcctatactctggtctgcgtagtaaatcatgtatgtaccagatttagagaatagtacttctttgggaaaaacttcgatttcaccttcgaattgttcccaatcctgaggagtaagagtgatatcataggactctccatcaccttgttctatcatccggactttttcaattttccatgtacggcataaggcattggttaattcatcatctgacatggtttcttccttagttacatcaagtgttacagggccgccattggttggagtcagattgaaaccttttacttcttctcccgttccgtatacgatttcaatagtaccaaagccttccaaatttaatgtcccatctgagttttcagtgtattgtccataaataataccattgtagttggtcgcacggctttgagttttaggttgtctgaaaataccgtatgtttctttattgagtgtgacttttgtggataaattggtgttatatccgttgtttagtgtgacaatatagtctccacctgcacctagttcaatactcttataaggggaagaggggttattaatggtgtactttccgctgatggattcgtatttaggagttcctaaatcaatactttcatcatctccgcatgcagttagaaatggcattgttaataacatacccaaaataataccgaataagctttttagatttctcataacactctttttttatatttaacttcctcaagtttaatcctttttcgtggggacaaaaagtgatgagaaacggctttagggattaaatgtaatctatgaaagaataaagagtaataaaatgcatctatccggaataaaatttttcagatagatgcatttcattgtgagtgtaaaattagtcttccactctgtattccagtatgtctcccggctggcagtccagttctttgcagatagcctccagagtggagaagcgtatggctttggcttttcctgtttttaaaatagagagatttgccggcgtaaggtcaatcctttcagcaagttctcccagcgaaatctttcgtttcgccatcatcacatctagatttacgataatcggcataaattattcagtttagttttcttcttcttcttcagtcaataccttccaccagcgggtatagcgttttactaatacatggtgcaggtacattccaccataaatcattcccgtcatgactaacacgcggtgggaacgtatctctatctgttgctcgatgaacaaccagtaaatgatggtcagcagcatcaaggtaagtatcatggtcagaatgataccgattgcagctttccatttagtattaatagttttcatctttccattcaaatttaaatggttaattcattctcttctttcaaccgtaagccgatggcaaacacttctgaggctaagagggcgataaagcctaaaatcagtgtggaatcagagaaggcaattaatatattcaatttgcttcctgccagttcaatgcattgtgcaagctgatggtttgaaatccagatactaataaaagaaagcacacatattcctgtcaggctccatcctacgcggcgcaggtgttttacgttaatccagtcgaacacgatgtttcggttgatgtgtatcatcagtttggcgaaatagacagttgcatagacaaatccgataatgacaataaaaccgatgagaccttgcagcacttcaaagccatggctggaatgggaataggggcattccacaagagctgtaatcggtttgacagccagttgtctgccgtctttcaagttggtgactgttccggtcgtttccatcatgtcagtaggcaagacgtgtaccattttatattgaggtatctcagtgatttctccttgtgcagctttcatgcctacctctactccgtttacaaacatttctataattaagtacacatttccggaaacggacaacaggaaagcagcaatcatgcatacacagaatatattcagtctctttttcataatgtagatgaagattttaaatggtcaaatcattttcttgttttagttttactgctactacaaatacttccgtgagaagtatcagcaacaatatacctatccaactgaactcaaaaggagatgcgggctggatggtgtatcccggaattgtaagttgtgccatggcatcacgggtttcactccagttgaggaaatacttaaccaagtgataggcaataggaggataaactccccaccgtatccgtcggatattgatggatgtaaagacctctttgcggatgatagagataaacagacggatgaggttgtaaagtccataaaaggataccagccctgtgagaccaagcagtatataagtgaaatttgtcagtccgctgggtacgatgtacgaatggcattgcatgaatccggtgggaacagttgtgccggcttgcgagttggctgcttgtatggctgaatcgggcaatacatcgaaggtggttgcagttaccttgtcaaaagccggatctgcagactctatactgatgggagccagtttatctacatcgctccagccgtcattaaagccgcctatgaattcaaagagtacgattaatagggctattaatccaatgattttaaatgttttcattgtgtgaatgtgtttgtgaagacagtgtattgttctctatttcaattgtttctgcttgagcaggctgatgccatactgccggctgcggaaccagtttcttttgaatgaacagcacacagatgatggtaagaaccattcctccagccgccataagagctgctcccgtttgtccgtaagtagaaaccatggtagcattcggatcgcctgctaataagaaagaagctacggctgcactgttattgacaaagtgcatcaggatgccgggcaacaaactgcctgtgcgataatacatccatcccagtgccaatccggttacgaaggcgaacggtgcctgtacccagttaccatgcactactccgaaaatcaatgacgaaagtacgatggctcctgccggatgtttccatttgcgaagtaaatgtccctgaatggctccacggaacagcagttcctctacgataggagccatgatgaccacggcaatgatgcccagtgggttacgcattatcatttcgaacgcctcctgcatgttgttaggtaagtcggccagctcattgaaatagttggtccataagcccatcgctaaaatgaatatcactgaggttgctaacagtttgggtgagtggtgatacccccaggtcttctggtccagtcccacatatttccctactaacagatgaatacctactgccgcggtggagaggatttgtgccagcatgataaggtttgtatacaggctgtcgggtgtctgtggaacctcataactgccttgatacaacatatatccacagatagctactcccatgaaagctaattggtaagcgaagaaatacagtaataatttgatagtgcgtcccataatgtgtgcgtttttaaatggttagtttatttgttttcagaaagcttctgaagggttggcccctcagttctccaggtcagcagataagctggtgtccaggtcatttgttctgcatcccagcggtaagcttttttctcggtcatggttcccaacgtgtcgtactggtattcgtacttccatttgggagtaagtgttttgccgtcctcattcaaggtagaaacaatcaggctttgctggttctgtccgtaaatgaaggtttcttttgcgtttacatttgtggctgtcaatgtcatcaatgcagcagcgattcctgctaccagtgtcttttttgtgaatgtctttttcataattgtacgtgtttgtgtgtaaataatagtgtttgtttgcgtttgtattcgataaatatttatcgtttttcgatatgcaaatgtagatattatttttgaactgcaaaagaaaaacagaaatattttatcgaaaaacgataaaaatttgcctttttgaggaaaatctcatctgaagataccaaattcaggtgttgtgaggggagagggataaagaggaaagtctgattgggtagtctggagaatgaatgtatatgttctatgttttgcgtacggaaaacgtacgtttctcaaggcggaaccgtatgttttcgggtagggaaacgtagggttctgggctgagagacatagaatattccaaaacattttctgtttattgatgagtcattttctacattaaataatggaggaaaaccgtggatatagacagaaaatctctaaatttgctgagtatgaatcgagctatgacggaaaaacaactgatagaagaactgcgatgtggaaatgaatctgctttcagacggatctacgaccggcactatgtccctctctgccgtttcgctgatttgtttctccatgacgcatctttgtcagaggaggtggtagatgatgccatcttttatttgtgggaacatcgaagtgaggtggaaatcacttattctttgaaagcctatttgatgaaatcggttcgtaatcgttgcttgaatgaactgaattctcttgcacatcgtgaagaattgcagttttcttctttttctcttcccgagaatgtggaatttctggataccttatttatagagaaagaccatccgttaggttatctgttggagcaggaactggaagaagaactcgaacgcagtatcgaggccctgccagaagaatgtcgtgtggttttcaaaaaaagtcgttttgaacaaaaaaaatacgaagaaatagcccgcgagttgaatatctctgtcaatacagttaagtatcacataaagaatgcattggcctttcttcagaagcgcatgtcaggctatctgaagctgctcgtgtggtatatttttctgggaaattgaaaaaatcttcttttttgactaccctcttttttctcttttttgtcttacttataaacacagcaaattatgcagcacgaagaaatgataaatgaacggattgatcagttgattgcggaatacctttccggtagtctgacggcagacgcttttcaggaattgaaaaactggagccagcagtcggacgagaaccggatgtacgtccgtaatcagatagaagtctggttttcatcgggagtgactgcaaaagataaggtgttcgataaggaagaagcttttgcccgtttccagaaacgaatcggaaagaaagagccgaaggtgtaccgtttctcatggaagaccttctaccgggtggcagccgtgatattgattgtgctgcttccgctggccggttactggaaaggacaggaaacacttcgccagacgttctcggatatggtggtagaggctccgctgggagcacgtaccaagctgtatttgccggatggtacgttagtgtggctgaatgctggttccaaaatcacctattcgcagggatttggtatggataaccgtcagctcagtctggaaggagaaggctattttgaggtggttcataatcaagaccttccttttgagattcatacgcatgaagtagacttgcgtgtattgggtaccaagttcaatttcaagaactactcggatgatgaagaagtgacggtgagtctattggagggaaaggttgctttgcataatagtttgaaatccatgtcagacttatatctttctcctaatgagaaaatggtgctgaacaagcgtacgggcgaaatggtgaaatcgagagcccgtgcagagaattccatgttatggacaaacgatgagctgttcttcgacgaggaattattggaagacattgccaagaaactgatgcgtagctacgatgtacgaattgagatagccgacagcctgaagaaccgtcgtttctacggtagcttcaaggtgatgggtaatactatagaagaagtactggaaactattgcttcaaccaatcgtatgaagtatcgatacgaaaatgaaaaatacatcctttattaactaatttgtcaaaccttaaaaagagaaacaccatgaacatagaatcttccggctgacagggtccataaggcgaagacataaaaaacaaggaagatgcgggcacatcctccttgctggtttgcaagtcttctgcatagggcaaaaacttgaatcaaagatgccgcaaagataggtattcttcgattcttacaattcttattttagttatttaattaaaaatcaacagaattatgagatatttcaataaggctatgttagtagcctcggcagcgctttgcctgaacttatcggtcttttctcagaatattacactgaaaaccggtaatgtaacggtaaaggaggcgatggaacagttgaagaagtcgtcagggtattcgtttgtgttttcatcagttgatgtggatacgcagaaacacatttccatttccgtgcaagacgggaatatagatgatgtggttcggcaaatcttggctggccaaataggaattacttatgagattaaagataagaatattattataaaaaagtccgagaatggggtggtttcgtccaaaaagttgcagacaaaaggatctgttcgggatgtgaatggcgaaccgattattggtgcaacagtcatggaacgaggaacttctaatggtacgattacggacattgacggtaattttatgttggaagtgcccgaaggagctatgctagacatttcgtatgtagggtacaagaaccaaagtgtacaagtgctttcagggaaacaaatagctattagtttaagagaagattctgaaacgttggatgaagtcgtagtcattggttatggagcacagaaaaaggtgaatgtgataggctctattgcaacattagatagtgaaactttagaatcacgtgcggttccggatgtttccaatatgttgactggccagttatctggagtaactatcacacagacaagtggaaatccgggacaagatgccggtacaattcgtgtacgtggagtaggctctttcggagctactcctgatccgttggtgctgattgatgggatgcctggttctcttagtgatttgactccatcggaaatagaaaatatttcagtgctgaaggatgcggcttcggctgctatttatggttcccgtgcggcaaatggagtaatcctcgtaactacaaaggaaggaaaggcaggcaaaacacatattacctacaatggttctataggtatgagtcaggctacggaattacctgattttgcccattcgtatgagtatgctgagtactataatatggcaatgggaacagaaacttacactccagagatgattcggaaatatcgtgatggttccgatccggacaattatgctgatgaaatgtatttggatgaattgcttggtggacatgccttgcagactaagcatgaattaagtgtgaatggaggttctggaaaacttcagtatatggcttcacttggatatcttcgtcagaatggtttactggataataattattataaccgttacaatgcaagagtaaacctgaatgcggaaattgctaaaaatgtgtcacttagtgtgagagttagcggaatgacatctgataggcatgaaccttctactcctggagtacttgataatgagggattcaaaggtattatagcaaatgctgtccgttatccgggactgacacctagttatttatcaactggtgaaatcggtccgggacccaaattacagggtaccccagtggcgtgggtgaattgtgcttctttttaccgtgaggattttgataaattcaatggtaatatagagcttacttggaaacctataaaaggacttacattgagagctattggtggatataactatgcattaagcactatccgtaattatcgggcagatatgccgctggccggagggcagagtacaggtccttcatctttaaccaattccatggagcgtactgtatataagacatttcaggccgtagccgattataatactattattgcaaagagacataatttgtcggtactattaggttatacttgggaagacgaaggacaacgaacattaagtggaagccgtaataactttccatcagatgatgtgccgtatctgggagcaggtggagctgacggtcaaactaatgatggaggtggatatgactgggcaatacagtctgtttttggtcgtttgacttataattatgatcagcggtatctttttgagacgactatgagatatgacggctcttcaaggttcccgtcaaatacaaaattcggttttttcccttctgtagctgccggatggcgtgtgtctgaagaaaaattctggaaagagagaaatgtgtccgactggttcaataatttgaaactaaaggcttcttatggtatattgggaaataataatatcggtaattatccttaccagtctgtatatactttgggggaggcacagaattatgtgtttggaggcgtatatacccaaggtgcagctgttacgacttatgtagatccgacgttgaaatgggaacggacgcgtacggctgattttggtatcgagacgggtttctttgataataaactgaccttgaatgctgcttattttcatcgaaagacaacggacgtgctttacaagcctgcggctagttattcttctatttttggtttggccatctcagaggttaataccggtgaattggaaaacaagggatgggagtttgagataggacatcaaaatacaatcggtgatttccattatcatgttaatggtaatttttctatcattaaaaacaaagttctaacattgggaatgggaaatgtaacccaaaataatggtatgataggtaatggaagcgatttgtttattggctatccgatggagatgttttatgggtataagacagatggtgtgtttcttacggacgcagaagtgaacgattggtatgatcagactgaaatagccaaaggttcacaggctggagatatccgttatgtagacattacaggtgatggaaaagtaacgcctgatgacagaacatacttaggatcacgtattccgaaatatacttttggcctgaatttgggtgctgaatataaaggatttgattttagtatgttaatacagggagttgctggtgtaaaaggtacgctttctgtatatgccggatatgctttttatcaggaaggcaatatacagcgttggcagatggaaaattgctggaatgtacagcaagacaatcgttatcctgaatatccgcgtttggaagttatgtcaaatgcgggaagcaataatactttaacttcggattattgggtgttgaatgcttcttatgtcaaagtccgtaatatccagtttggctatacgttgcctgaatctgtgactcggaagtttggttccagtggtatgcgtttttatgtaagtttggataatccactgacatttaaaagctatcgtgaaggttgggatcctgagaatacaagtaatgatggacaatattatccaactatgtctacttacacctttggtttaacattaaaattctaaagccttatgaaatgttctaaatatttgatgcttgctaccttgcttgcttcattgtctttctcgtcatgtgacttggaaagattgcctctgaccgacctatcggaagaaaatttttggaatgatgaaaaaaatgcagaacttgccttgactgctctttatcgtggaaagataactaatggcttggaatatagcgtgtctgatttctggtcttatcatgggttgctgtttatggaacatttgacagacaatgcgtttgatcgcaggggagaaaataatgacttttacaagatatccagtgggcagttgctgaacacgaattcttttatcgcgaattattggtcgtcggcttattcacgcattggtaaatgcaatcgttttctggaaggaatgcaaaaaatgccagaatcagaccagaataaaaggatgatagctgaagctcgttttttgcgtgcgactcaatatcattatctggcaagttattttaaggatgtatcgttagtaaccactgtgttgagtggtgaggaggccaatacggtaaaaagaagtacacaatctgaaatattggcatggtgtgctactgaatttaaagaagctgctgcagatttgccacgctttaaggatcttgcttcaagtgaaacgggccgtgcctgcaaacaggctgctttggcttttctaggccgcacatgtatgcttcaaaaagattgggcgagtggagctgccgcttataaggaaatcatagattatggagacaatgatatccacacgagttatccggaattattctggccaggtaccggggttggcaataaagagaatattttctatattgcttatttggagaattattttggctgtggtatgcctcagcaagtgcttccagctaaagatggaggatggagtctttccaatccttctgccggcttgtttgaatcttatgaatttgttgatggtactccgttcagttatgatgacccacgttataatccaaataatttaggagagaaccgtgaccctcgtttggactatactttgttttataatggtgcggattttatgggtacaacgtatcgcatgagtccagattatgaagcttctgctaaagagcgacttgattattcgtcagaagcatcaaaaacaggtttcatgtggcggaagtattttgatgagaatccgattaatgatattcaaagctatagcgcagtgacacctataattcgttatgcggaagtgttgttgggttatctggaatgtttgattgaagggggagaggttattgataagcctatattagatgctacaatcaacaaagtgcgtggtcgtgccggggtagagatgcctcctattacagaaacagatccgtctattttacgggaaagactccgtaacgaacgaagaatagaattggcctatgagggaatacgttattgggatttattgcgttgggaaattgcagacaaggttttagttggagaagtttggggagcaccttacccttcttctactacttatgcttcctctactaaggaaatagatcctacagggaattgtcgttggtatgttggacgtcgtgattttcgcaatccgcaagattataaatggcctattcctttgtcagagcagaatataaatcccaatttacgtgattagtactgataataattaatgatatgaaaatacagtatttaacattctctctactctctccgtttgtttgtaattgggttagtggagcttctgtggaagatagcaataagaatgaggtaactgaacgcctattgcccaatgtcattatcatttatgcagatgatttggggtatggtgatctgcaatgttatggcgcgaaaaatatagagacgccaaatgtgaacaagctggctgatgaagggttacgttttacgaatatgcatgctgtggctgctaccagtactccttcacgttattcattattgacgggtgaatatgcttggaggaaaaaaggtacagatgttgcagctggaaatgcaggaatgattattcgtcctgaacaatatactatggctgatatgtttaagcattctggttatgtgactggagccgttggcaagtggcatttaggcttaggtgataagactggtgagcaggattggaatgctcctttacctgcttctttggctgatttgggatttgactatcattatattatggctgctacagctgaccgtgttccttgcgtatttatagagaatggacaagtggcgggatatgatccgacagctcctatcgaggtgagttataagcaaaattttccaggagaacctacaggaaaagacaatcctgagctattgtataacctgaagccaagccatgggcatgacatgtcaattgtgaacggtattagccgtattggatacatgaaaggaggtggaaaggcattgtggaaagatgagaatattgctgattctattacttcgcatgctattgattttatcagccagcatcaaaatgaaccgttttttctttattttgcaacaaatgacgtgcatgtaccccgtttcccccacgaacgttttcgaggaaaaagtccgatggggttgcgtggagatgctattctgcaatttgactggagtgtaggccaaattatgaaaacgttagatagattgggtttaacagaaaatacgcttgttattttgtctagtgacaatgggccggttgtggatgatggttatgatgatcgagctgaagagctattgaatgggcatacgccttccggaccgttaagaggttataagtatagtgcttttgaaggtggaacaactgttcctgccattgtgcgctggccaaaaatgatacaaaaaaagggcgtatcaaatgtgttgatgtcgcagattgactggatggcttcattaggagagttgattcatgcacatttacctaaagggagtgctcctgatagttggaaccggttaggtaatctattgggtacggataatacagatcgttcctgggttgtagagtttgcggctaatcatgtattgtctatccgaactaaagattggaaatatatagaaccaaatgatgggccacgcatgattacttggggaccgagaatagaaacaggtaatgacagtattccacaattgtatgaaatgaagaaagttaacgaacaagaaaatgtagcggctcaatatcctgaaaagttatttgaaatgcagactttgttgcgaaaagcgaaattaggtcagtagttgtaaagctatttagttggtgctctaaaggagaatcaatggatagacttacttaaagtctgtaaattataatataaaaatctcctgctttagctttcatttaccttaatgatatgtctaaaagtaggaggttttttatttttaatttttttgtaattctatttgagataatctctttttgtatgataaatctctttttgtaatttcgagagaaatttaattataatgaggtatgggtagaaaatcttttttgatgaagtgatttaaacttatgtatatcaattaaaatgttgtcaaacagcgtacaaatagaattattcattatattatgggtgac

SEQ ID NO: 3765 - DNA, 77590 bp, Unknown
  gut microbiota DNA sequence
caaactgacaactattttcagtacacttcaatgatttttggtatcttttgaaaacgcaagtgcgtttggattaaaacgtccttgtgtttgaagtcaaacgcacttgcgttttaactaaaacgtacttgcgttttggactaaacgtcgaagcgttttttgaaaggtgaaattagtggcgtttaatagatgttctttatcatattatattttgtatgtcattgtaaattaatatcttatgattttttcttttttatagaaattaaggtgatgaatatttttgcacccttaaatgaactattttgtcacctctttctataattaaactgtacatttgtgacgaaaactttaaaatctaaatttaatctaaattcttgtatgcaaaccgaattccgaactattctatggagaaggggattgagcatgatgttgttcgtcttgttctctgtaactgtggctatggcccaggtactcgtgaggggtactgtggttgaccagacgggtgaaagcgttattggtgccagtatccaagtgaaagggactactcagggaactattactgatattgatggtaagttctcattgggagtacccgacaaaaaatccgttattgtggtctcttttattggctatgccacaaaagaactgcaggtggatacctctaagccgatgtctatcgtattggaagaagatacgaaggtattggatgaagtagtagtagtaggttaccaggaagtaagaaagaaagacttgaccggttccgtggctaaggcagatatgaatgaattgctgaatacgccggtcggctcgttcgaccagaacctgggaggacgtattgccggtgtgaacgtgtcttccagcgaaggtacgccgggcggaaccatgaacatcgtgattcgtggtaacaactcgttgacacaggataactctccgctttatgtgattgatggtttccccgtagaagatgcagctattgccagcactatcaacccttcggatattgaatcgttggatattttgaaggatgcatcagctacggctatttacggtgcccgtggtgcgaatggtgttgttatcattactacaaagaaaggaaaggttggtaaggcgcaattgagttatgatggtagcgtaaccatgcaacatgtaacgcgtactattccgatgatggatgcatacgaatttgtaaaattgcaagccgaaatgtatccggaacagatgacttcatccaatggtggttatttgatggaatgggagggtaaacaatggacactggaagattaccgtaatattgaccagtataactggcaggatgaaattttccgtaccgctttgcagcacaaccacaacctgcgtttgagtggtggtacggaaggagttcgttataatgcttctctttcttattataatcaggagggtatattgctgaattctggttatgagcgtttgcagggccgtatgaacacggtagttcgtcgtgacaaactgaatatgagtttgacagccaactattctcgttctattcagactggttccactccttcagagaactcttacagtggtatgaacaacttgttctatagcgtgtgggggtatcgtccggttactttcccgaacaaaccgcttagctctttgatggataacgtaatggatgatgcagtggataacagcaacgactaccgtttcaacccgattatgtcgttaaagaacgaataccgcaaaaattatatcaataacttgcagttgaacggttttgtggaatatgaatttattaaaggcttgaagttgaaagtttcgggtggttatacatacgatgcacgtaagaatgaccagtttaataactccaagacacgttatggtggtcctacttcaacagataaggtaaatgcccaagttgttcgtaatgaacgtctgacctggttgaacgaaaatacattgacttatcagactaatatcaagaaaaaacacttctttaatacattagtcggtattacattccagaattcggattatgaatattattcatttaagaccattcatatacctaacgagtcattaggtatggcgggtatgaatgaaggacaggcaagtacgaccaattcatacaagacttcatggtcaatgatgtcttatcttgcccgttttaattataattacaaatcgaaatactatgcaacggcctcattccgtgccgatggctcttctaaatttagtaaaaagaaccgttacggttatttcccttctggttctttggcctggaattttatggaagaagagtttatgaaaccgttgaaaaaggtacttgatgctggtaagcttcgtgcgagctggggattgaccggtaacaaccgaattggtgaatatgaatattatgccttgttgcaggcgctgaagtcgaaagtgggagattatatttctaacggaagtattccaagtggtgtttatcctattaatggtagtactaccaatgtaggaacggttcctacttctattggtaatagcaacttgaaatgggaaaccacggaacagtggaatgtgggattggatttaagtttcttcaaggaacgtttgaattttacagcagatatttatcgtaaaactacgcgagatttgctcttagaggcttctcttccgttgacttccggtttctacagtgcaacgaagaatattggtaaggtacgtaatgacggattggaattgagcttgaatacagtgaatattcagacaaaggactttacctggtcaaccgattttaacatcgcgttcaataagaatgaagtattagcattgtctgaagggcagaacagcttactgacggcagcctcatttgaccagaattataactcacagcccagttacattgctcaggtaggattgcctatgggtatgatgtatggctatatttatgagggaacttataagtatgatgattttaataaatctggtgatacctatacattaaagaaaggggttccatattattctacagaaaccaatacacaaccgggtatgcctaaatataaggacgtgaacggtgacggaatcattgattccaacgaccgtacgattataggccgtggcttaccgattcacacaggtggtttcactaataactttacttacaaaggatttgacttaagtgtatttttccagtggtcatacggtaatgacattatgaatgccaaccgtctgttctttgaaagctcgaacaacaagtcgcgcgagctgaaccagtatgccagctatgccggtcgctggacaccggaaaacccggacagtgacattccggcagcaactacttctgcttcaaatcgtgtgatttcttcccgaattgtagaagacggttccttcttacgtttgaaaacagtgacattgggttacactttcccaaaaacgttgattgcaaaggctaagttaagcaatgcaagagtttacattgctgcgcagaatttgtggacatggaccagctactctggttatgatccggaagtgtcggttcgtaacagtgcgttgactccgggacttgacttctcttcttatccgagagcttattctatcagttttggtgttaacctaggtttctaataagagtttacaaagttttaagggattaattatgaaagcattaaaatatacgatttttactttattgtttggcggtgcactgacatcctgtaattttctggataaagagccttaccagcttacactgtcagactattttaatacggcagatgaggccaactcttttttgaccggaatttatgcagagttaggtcagtctacgttctatggagcagactatatgtatcttgtgggaggtgatgatttgtctcactatggaggttcaggacgtgcacctgccactaaaggactgatttgtaataatgctactaccagtgatgcggcagtaacaggattctggtatactttgtattccggcattaaccgtgcgaacatttttttggaaaatattgataaggtttctgatattgattctggtttgaaagctcagtatacagcggaagcaagatttttgcgtgcgttctattattttaacttagtgcagtgctggggggacgtgccttttaaaacagaatctacgaaagatgtggtaggattggatattcctcgtacagacaagcaggaaatttatgatttcattattaaggagatgcaggaagtttcagatgaaaagactggaggcttgttgacagctgcaaaactgaattataagcctggtcgtgtgtcaaaatcagccgcatggggtattttggcgcgtgtatatctgttccgtgcaggagaatatcatcgcgataaccgtgcagctacagatgctgaaaaaaaggattattatcaggctgcaaaagattatgcgttgaaagtctgtacaaatcaaggacatgacttagcaaaggattattgggattacttcattgatttatgttctgatcgttataattccacagctaatgagagcatttgggaagctgaattttccggtaataacactacggatgtaaaggcagaaggacgtattggtaatattattggtttggcagctcctgatatgtcatctaattcagatatagtaggtgcagcagatccgggatattcgtatgagtttatgtttgcaactcctaaattgtatcgcttgtattgtattgaagaaccaagtagtgagagactgatgtctcttcatgtaaattggaatacaggtgataaaacagaaaaagcagaaggtgaggcttgcaagactattaaattgaaggatagtcgtttcttgtggaatattgctccttttgtttatatggaaaaagatggcaaaaataccggtgtgacgggacgtaaattttatgaactgggtttccgggatgctgtccttgctcatgataataacagatcttattcttatgggaaaaaagattgggcttctggaacaacagaacccaaggaaggagattatgactataatagtaaatttacgacgaatatagctcgtgcatgttctaaataccgtcgtgaatatgaggccgataagaaagataagaataatactgctattaatttcccaattttacgttattctgatgtgctgctgatggtagcggaagctgaaaatgaattgaacggaccggatgccgcttatgattatctgaataaggtgagagagcgtgctggagcaagtacaattgtaaagggagctttaaacaaagatgagttccgccagatggtgaaagatgagcgcggtcgtgaactttgctttgaatatactcgtcattttgacttgattcgttggggagactttgtagaggatatgaatgagcttattgattacgctcgtgcaggaggggaatggaatcagggcccttcaaatgtgtatacttatttccaggtatcttctacttataattatttccctatacctgatgcggaaatggctgtgaataaggcaatcacaagcaacaatccgggttggtaatgataaatgtattaatgaaaatttaattattggtaaatgaaaacttcaaaattatatatattgttgctttctacgttggcttttgcgtcttgtacaaaggagatgaccgaaggactggacgaagtaaacgtaagcgtggtgacatcagagactgttactgccgaagggagtataattactgtaaaaaaaggaactccggtagagttctcttttgcgggagaacctgatttcataactttttatagtggagaacttggacatcagtatatttaccgtcaacgtgtggaaaatgaagaatcagatattgtttcttcaaagttaaaatttaatatctatcaggaaggtacttcatacgcagagtcaacagggcgttatactaattgtattgatgtcttttatgctttttccgatccggaaaatggggtagaaggtttccccggtttatcaaaagataattttgatgctgattctacgctggttgttgatttctggaaagcgggaaagtggaaggaaatttgtcctaaagctgagtacgataatcttggaacgaatataactgtggcaaagtcttgtgagttggatgtaaaggattttgtaggtaagaatttggttatagcgatagcttataacaaagaggaaagacctaatcctagcgttaatggaaagaatgctactactcagttgaaatattattttgactctatgaatatagagaatctgcttcgcaataacaatgtgacgcatcaatatgcaggtgaattcatgtttactgcgttgaacttcaatcatgaaaatctctataaccagtcaattaaagacgatgataagggatataaaggtaacgattggactagcgtttcaagctatttacctgatgatttagcgtatggcacagtaacagcaaatgtttcagggatgtggaacatgaacaatgtggcaaatggaggattctatattcacagtacgggaagtgcttattcgtggaaaactgcctggctggtgtctgaccctattaagattacctcatgtgaacctgatcagggggtaagcatcaagaacttgtcgcaagacattcgttcatatagctatacctatgaaaatgtgggtacttacagagcaactttcttgattacaaatgcgaactataagcatgacgattcacaggtatatactgtggttgtcaatgtgacagattaactttaaattatgaattacgttatgaaatacataaaatcatatatccttttggctctcatggtattggctgtgacgggttgtaagcaggaggatttgaaggacgatgtgaatgctctcaaggatagagtgactctgcttgaagaacaagtaaaattactgaatgagaatattgcattcttctctaaagtattggtttgtcagacgatagataatggtgacggtacttttaccgaagttccggcttattctatttctgaggtattggtaaatgatggaactacttttactgccaagtttaatgacgggaatgtattgacacttgcaattggttcaaaaggtacggttacgactcctcagctgggggttaatccggaaacgggcaagtggatgctgaatggcagtgatactccttataatgcagtgggtgctgatagtagtgttgatggagataagcctgaatttaacattgcattggataattctacacggcagtattattggcaagtaagatttggcgactctgagccttggcagaatgtaactgatgcagaaggtaataaagtgtatgtaactgaagctggtggtgaattagccaaggataacctttttaaggatgcaaaggtagaggaaaatgagtttgtgctgacctattatacaaatggtgacgggcaagatcctacaaatgaagttcgcattcctatcatctcagacctgtcatgcgtgatcaatgtaccggaaaaagatatggcggatggttattgggaaattggtgcagatggagcttctgccgaagtagagataaaaggtgaccattggtttgtgattgctcctcacggatgggaagctagcatttctgaaactttgactgacggtaaagctactttgacagtgaaaaagtcagcaactgcttctgctggcttgaaaagtcgtgctactgccaataatacggatgaagtggtggtacaggtgaataaaggaatgtactgggctgtagcaaaggtgaaggttcgggaagctgtgaccagctatttcaatcaggtgtataatcagggaggtgacattactgtgggtaatgtgactataaataaggcgacttactcggatggaaaactgctttcaactgatgccgcaacaatctctgcggatggcgtttattttattcctcagggtgtggaagctgttatctcttcaactgactttaataaattggtattaatttcagataatccgaagggtgaaccggttgttgttgataatacaaatttgtttaatgctacaggaacagcgggtgaatttattgctcaaaatgtgatatttaagaacgcaatatctccatttatgcagataaatgcttcaggcattatattgaataatttgattctggatggttgtaaagtaccaatcgcttcaggtggaaatttcttaaatgcatttttgggcgatgataattcaattgataatatatatttgaaaggaaatcgttttgcatttaaccaaacaacagcatatgctgcttctcgattgtttaatttgtcaggctcgactggaagcggtgagaataaagttgtttataatcgaaatttgagcgcagatgtttccataataaataatgtattttactcaacgatgactaatgattattcaattaatggtaacattctggttttaacaactgatggtactgatggaatttacagtgaaaaaaatactatcacaatagaaaataatacgtttattaatttcctttgtggttcccaacctatgatacgtggcaacataagaggtacagttatattccgtaatcttttgttgtggagtaatactaatgatgaaaaagcaaagacctcgtatttactgaatgtacattcggcgaccccttcagtagttacttttgagaatcttctaaaatttgataagggcaaggatattccaactaattattggaatggtactattccgagtggctatactcagacaaaagtagaagcagcctcttccgatccatttgatgtaagtgctggagctacatttgatttggagaatggagtatttatcccgactgcagaatatgcaaattatggtgcacaacaacgctaaatttttaatatcatgaaaaaattactatatctatttattacatgtctgtcttttatcgcgttctcatcgtgcgatgaccgtgatgaaattcgcaatgacattaacgacctgaattcgcgtctggatgcattggatgcacagatagatgcttataacaagcagattgttgcttatcaggacatggttttggggcaggtttacatcaaagactatagtcgtgatgaaaagaccggaaattatgtactcactttgagcgatggaacggctgtgacggtttacagcggaaatccggataacgaaatgccgcaaatgtatattgcagatgatggcacgtggcattacacgcaggacggtgcggactatgtcctgacagatgatgctggaaattcaattactgcgtggccggtagatgggaaaaatggggtaactcctcagattagtgtcgatgcagaaggttactggcaggtttctatggatggaggtgccacttgggaacgtcttggaggaactactcctatagcaagtccggacatgatgttacctagtatttttcagtctgtaacggttagtgaggatggcaagtcaatgacatttgtagtggcttctacgggagaatcagtaacggttcctgtgggagttgaagattcttttggtttgaccttgacggatgggtatgatttgtctgtccgggctgggcaatctgtttcagttgctattcagcagaccaatgtaaaggagattgtaattgaatcaactccgttgcaggtggaagtgactgaaacgaatttgaaagtgacagctccagctggcctttcaggttcttatacgttgtatctgaaagtcttctcagcggaaggctactgtaagctggttacggtaaacgtgacagttcgttaagagtatgaacaataggttaacaaaacaagatgtacattatgaaaatctataaatatataggtgtggccctgatggtactatcattgggagcatgtaagaccgatgatctggaaagagacattgatgccttgaaagatcgtgtaactgccatggaagcaaaggtcgatcggttgaatgaaagcatgaacatgatacgtgtggctttggacgggaacaagaccatccaatgttatacagaaaatgaggatggaagctatactttgacgctaagtgatggaaatacaatcacgctgactcagggggaaataggagctacggatgtgtatcaggaagtgagtatttctactgacggtaattgggtgattggcggtgtggaaacgaagcaccatgcagtggctgtagatggtgtaccgggggttactcctcagttccgtctggctatggagtcggaaggcaaatactactgggaggtaagctatgatgtcagcaagctgacttgggaagaagtgaagaatcagcaaggaactcgtgtatatgcttctgcaagtggaagttcttctgtggctggtccgatagcatctgctgctcctaatgcgacaggagataaattcgaaattactttaacgggtagtggtacgaaatatgaaattcctatcgtttcgggtctggcatgtgccattacggaaccgaatccggaaaatatggaaaatggatactggattgtgccgactaatacaggagcgactacttctatcgatttgaaaggagaagcggtgttgataagtgcaccggaaggttggactgtaactgcatcaatagataattctaatccgacgactttgtctgttacccctccgaatcaagatggagcggaaggtgtcattattttgcaagttcataaaggattacattgggcgattgaccagattaaggtacgttctaagaaagtaatcacaagctggtatcaggaatttctggcaggcgctgaaattgttgtgaatgacgtgacaataaagaagggaagtgcggataataaagtcgttattaatggagaggaagttgatttgactgtagatcttattgatactgataatgcagaaattactgcagatggactttattttattgaagctggattgaacgtaacatataagaattcccaaaataagaacaaggttttaattaatgattctcctacaggggaaaagccggttgtgacatgtacgaacacaattacattgaatggaacgagtcttatttgtaagaatgtagctttaaaattgaatgagaatgcaacctatcgtttcttgacaataaatactaataatgctccgtatgtggcgtttgatgggtgtaatcttgaagtaccgtctactgctactcaaaatgcattttgttatgcatcgacagctgttgctataaatagcttcaccctccataaatctaaaataaaaatagataagtcgacagagtataatataataagtgttggaaaagacaattttgtaaatttcaattcaatatctgttgaaaatactattttctatgggaataatgcgtcaacatttaaattatttggagtgaataatggtaataccacgaatgcaggtattggatcattggtattgcgtaataccacattccttaatatgcattatgcaggatatggtattgtaaatggggatatttctacgatgattgtgaagaataatattatttatgcagataataataataataatgtgacggtgttccgcaaaagaggaaattcttcagcttcattgcaagctacagatggagaagtagctgataatattggctatattataggtgatttttatttgaacctgtggcaaggagatactcctcctttggaaaatgcagaaaagattcagaagttggatgcttctccttttgagtctttggataagtcaacaggtacgtatgtcttaaaaccagaatatcaaggctatggtgcaaccatagaataataaaaatagaaaaacagttttccgccatccgatacagcatcggatggcggatacatttaaacagataatactatgaacttgcgattttggaagaatgcattgttctgttgctgtttatttgcaatcacagcatgttcggacgaggaaaccgtgaaccctccagctccgacagagataccgaaacagccggctgaactggcagaacaattagcgcagtataattcagacattgcagctcttcagctgatggtggatggcgaggtggaagtagtggattatacttcggatgaacaacataactatacgttggagttaagtgacgggaaaattgtaaatgcggctttacaggcagaaaccgatactgatatcccagcttttgcgattaatgcggatggatattgggaatatcagctgggaggtgaaaaacagacattgacagacctttccggtaatcccgttccggcacgtaagagtttaggtaagggtacatttacccctcaactggccttaggggaagacggctgttggcagatgtctctgaacggagcgcattggaaaaaactgtcggacactccggctccttcactggaaggaaaaacggcggccagctattctttgtttaaatccgtcacggaaaatgaagatggaacattgtcactggctttatctggaggtgaaatggttctttcaatagatgctacggtttcttcatcggctcaggcatggaagaagttctttatgaagagtgaagataatgtattgctggattattcgtatgcaggatataatcacggagaaagtgctccattggatggattcgcctggggatacaaggtgataaacgtgaaagaacgtatggagaaagataatttgtcggcacgtgaagctttaatcaaaatcttggatgaaaataagctggtgcgtgtttctaaccagaatgcgacaaatgctactgcaaaaattgtaatctatttccctgcggatgattatgatttgcaaccgaaaggtgttacagataaattccctgaaatttacggaggaaattttgtaataaaaggtgccggagctggcaagacacgcctgctgatgaacaatcctattggaacagacgaatcgactaccgctccattgctgactattaaacataccaatagtccggcgaatattaataactctaagattctggcaactgtggtggaaaatgcggctaagggcagtttcagtgtaaaggttgggtcggtcaatgaattgtcggtcggcaaatgggtacagcttcgtttgcgaagcggaaatgatgaacttctaaagaaagaggtgggacctatatatagtcagatgacaacaaaatggtcggtggcacaacagccagggcttactggaacaaatgagaacgggaaaggtgtaaatgtcatggaattccatcagattaagtctattgatggtaatgtggtgactttctatgagccgattatgcatgaagtggatatcgcttataatgattatgatggtggatgggtaatacgtgattataaatattttgaaaatgtgggtgtggaagacttatcgtttgtcgggaaagctattactccttattatcatcatggggacaatgatccggatgcccctgatgcatggctttatgatagcggttatatgcctttgcagttgagccgtgtggtaaattcctgggtacgcaatgtaagctttgaaagtgtcagtgaggctgttacttttggagagtcggccaactgttcggcttataatatttcgattacgggtaatcgcggacactctgctgtgcgtgcacaaggttccagccgtgtgtttattggcaaggtgagtgacgaaagttttgacacacgaggtcatgggcaatggcacggttgcggggtttccaaaccaagtatgggaaccgtagtgtggaattgtaactggggacaggatgcctgctttgaatcgcatgccactcagcctcgtgctacgttgtttgataattgtcgggggggattggtacgctatcatgccggtggagcagacacggaagctcccaaccatttgtcagatcttactttgtggaatttggaggtgacgggtacaattgatgagaagggtattaactttgcttctgactttaaatggtgggatgccggaaatgtttggtggaaaatatatcctcctattgtggttggaacacatggacaagcagttactttctcacaagaagaaggtcagctgacatacgaggaaagtacggggacaaaggttactccggagtcattgtatgaggcacagcttcagaaacgtttgggatatgtaccggcttggctgaaagccttgaaataatcataatatgggaaatactgccccgtagtagatgcattgctattacggggtagttttgctatacagtgtaagaaaataataagaactggatttgaatgaaaaaaacttgtttaagattcttgactggcagattgttgcttttctgggcgataatggcgatagggatggtatgtgcatgtacggatgaaaatccggcaggtgaggaaggtaatgaaggtaacggaagcacggaaggagataatacaccgacagtgagtgatgtaattgttcagatgaaccgtgatgtggctgatatgcagcagattgctgagggaaaagtgaaggtacttacttgtatgaaagaaagcaacggacgttatctggtagaattggataacggacatgtgctcaccgtgtatgcagaggaggaacaggtaaagaagaactccgtcccattagtgggtattgatgcagatggttattgggtgtgtgaactggatggaaaaaccgaaaacctgaccactgcagacggacagttggcggcagctttaagttcggcagggaaaggaacttttactcctcagttccgggtgggagaaaaaaacttctgggaagtttcttataacggttctcaatggatgcaaataggtacccgtcaggtatgggatgtagaaaaggagccggctgcagctttttctccttttgccggatgttcggcagatgaggatgcgggacattgactatatctttgcgttgtggagagaagaaaattaatacacaagtgcagggaaaaggtaccacggatgcttggaacaaatttgtggcaggttcggccgataatgtgttgctggatttttcttatgccggttacaaacatggggaagaagaagcaccagatggatttgcattagggtataaaacgattaatgtgaaggaatatatggatgcccatcctgatttgactgcacgggaggcatttttgaaattgctgaaagaaaaaaagttggtacgcattgacgacgaaagcaaatcgtattcaaatgacaatgcaggagtggtgttctactttccggcaggagaatatgtgctgcataatgaggaggataatacgctgagacaagatgttgaaaaccccgcgtacgatggaaaagggaataatacgagctcgtctatcattatctatggtgggaactttgtaataaaaggagacgggcccgacaaaacgttcattaaaatggatactccgaatttgccaaccgatacggaggtgatgtattcttctctggtgatgattaacatcaagcataatgcatggctgggagctgaatatgaagtgacgggaaatgccgggaaaggtacctttaaggtaaaagtggccggggcatcgaattttaaagtaggtgaatgggtgtgcttgtatttgcacgataatagtccggaactggtgaaacaggagctgttgccgtatgcctgggaatcgacgatgaccaatatctcgacagaaggagtacaggtggaggattatcatcagattgtgaacatcagcggggatgaaattacctttaaagaaccgattatgcatgaggtggatgcacaatggaactggaaactgcgtaaatattcgtattatgagaatgtgggagtagaggatttgacatttgtagggcatgcggtagatgattttcaacatcatcgtagctggattgacgatggggcttacaaaccgattgcttttatgcgcgttgtcaattcatggatgcggcgtgtgaattttgagaatgtgagcgaggcagcttcaattatttcgagtgcgaatttttctgcttataagattaatattactggaaatcgcggtcatgcagctatccgttcccaaggttccagccgggtatttatcggtgcggtgcgtgattgtacagacggtccgttggcggatgaatatcctacgttccagagtaataccgggcagtatcatgcctgcggtgtatcaaaacccagtatgggggctgttatctggaaggttacgtggggagatgatgcttgctttgaatcgcatgccactcagcctcgtgctacactgatagataattgtacaggtggttttgtgcagtccagacagggcggagacgccaatcaagtgccgaatcatttgaatgacctgaccatctggaatatgttctctacgaatacaaaactgaatggcaatggtacactgccggcgaatggggagtttgactggtggcgtacgggttggaaatattggaaaattttaccgccggttattgtaggattccatggtgatcctgtcaagtttgtacaagagcaggtgaagctggatgaaagtaatggcatgccggtagaacctcagtcgctttatgaggcacaattggaacgccgtttgggtagtgttccagtttggttgaaggctttgaaataattataaactttaaatatcatgaacttaacgcgaaacctttatttactttttttgtgtggaatgtgtactccggctgtgcatgcagccggtaacatgacgacagatgcggcagtacagcagacggtgaatcaggatgcggacgcaacgaagctgaaagaacttgcagagttccgtaagaaatataagtttccggaaccgaaggcttctgagagtgagctgaaggctgcccagatggggctaaagatgctgatgctgcagcgtacgggagattataccgtgacaggagcagatttatggggtgagaaagtgatgaaccagcatctgagagatgtggcaaaaacggtacgtgcgttgtcatacggagtgcagaaatacggtaaatcagccaaaggcgatttggatttatatctggattatctgtttacacacaattttttccttcgtatgcctaagctggtatatagcaactatagtgatgtacgaaagattcctactgatttgatgagtgccattccggtatgtgatgaggtacgtaaggctaaaatgattgccgccgtacagaaattactggaagtggacgtgattcgtcaaggagataaggccatcctgaactggattagttcggactatattttcaatattgtgccatacgtgtttaatctggcactggctaacccgaacgaccagcaggctgtgcaggacttgcagttactctccggcttcctgcgggtatgtacgcgctataatgtgggcaataaggacatcttgaagccggacggtacaggtttccaccacaatgcgcactataacggatacatgtattcttacaaaacgtgggtggaatacttctatcgtttcaaggggacttcattcaagattgaccctaagtcgtacgaaagactgaaaaaggctgtcgtaacgatttacatgactgctgtgcgtgcagaaggtgataagaaccggatttatgccaacagtatggcaggacgccatcctttctatagtattgaggtgccctttacgcagaaactgtttgaacagttgattgagattggagcggatgccacaggtacggatttagataaggaactggctgcttattataattacttctttaagacggataagtatccggtaccggctgctgatgccaacggattctatcagtataactacagctcggcaggagtgtatcgccagccgggatgggtggctgtgatgaagtcgcctacggctatgttgtggggaagtgaaatttataacaagaccaatcgtttcggacgttaccagagtcacggtacactggaaattctgtacgatgggggactggttcctacaggttatccttctaacaatgagaacaagggtgctggatgggactggaatatgatgccgggaagtacgacagtacattataccaactgggcggaaatgatgccttataagaacgataaggatcgttttgaccagaaggccagaaagagcaattttgccggggctgtatcgatgaaggattacggactctttgctactgcttttgatcaggatgaccgttggggaagccagcgatttactcctaccaatttgactttctgtaagtcggtgttggctattgacggtatgttgttcagtattggaaatggtatttctgcaaagggtgattatgcggacaacatgattacggctacgaacttattccagtcggtagtaagtaagcagtacaataagttgactgtgaacggccaggaggtaacgaagggaaatcgccagaattatgcttcttcagaacctgtgacgatgattaatcctgtttcaaccggtttctttgttccggcaggtcacgatgaacttacggtgatttatgacgaacaggagacgccttcttctgtaggtatggctggtaaaccggctaaagaagtggtggcaaaagcatatatgaaccacggggtgaaaccggagaagaagtcttattcttttgttgtagttccggcagcggatgaagctaagatgaaggatgtggccgaccgtcagacaaaaggagaattattctcggtagtggaaatgcaggattccttgcacatcattaaatatgcaccgaagaatgtgctggcttattcattttttactcctacgaagggattgacagcaggtgaggtagtttcttcggctacggaactgttgctgatagaacaaaagaatacggatggtagtctgtcgttgggtatggccaatccgaacttgcgtcctaaaatgctggacaagaagaactggaaggagattcctacccctgcatttattgaactgaaggggatctggcagatggatggaaatgtgcctggtgtgttcttaaagacaatggagaatggaaatacggaagtgtcttgtttgttgcgaaacggacttcctgtgtatatgaagctggtgaaacagaaataaggctaaatactgaaaatataaaaggtcgttcttccaatgagtgaggaacgacctttttttatttttataaattcaatattttagtctttgtcaatctttaaaataccaccggtggtggaattgaaaatcacgcgggtgtttactttcttgtcgaacaagccgtctaccagtacttcggtgtaaccaaactgggtaaatgccatttcgtcgttgaaaagttttttaccctgataagttacagtaacatttcctttacccggtacattgtagatggcaccatctgcttttttctttttcttatcttcttccggtatgggaagggtagaagtgttgcggatggaaacataaatcgggtcaccagccagattgttggtcggaagtactcctaactgggtggagaaacgagcggcaacctgttcttgtgtatcactgccgggttctaccaatattgtaaagactttatctgtgcggtcggtcgtaccggtaaatgcttgcatcaacgctttttcttgtttgttcagctggtcaataaccagttgaagagaagctccgtcctttggcatggtttctgcctgaccgcgcaggatggtgttcttgctgtcgcgtatgttatagatttcgcgggcggtcagttctgccatttttgcgctggaaccagccatgaggatgtcttctgtcatgtatttgcgggcattctcatgggactgtggcttctctaacttgtagtcagggagagattctttttcggtagaggtcgtattgatggcttttacaatccctttgtcggtcagttctacattggatgccatactcttatctttcaacttcatgatgtaggctttcgtagagtcgggcactcctacaaggcggacttgaatatccttgatttcccaatggctttcaggctgtgaactgatattgttcagacgcaggtagcggctggcgtacaggctgaaatcgcccggctggtagtctaccttggtggcaatgatgtcaatggctactttggtcttaggcaggaagtacacgatgccctcgcctgcctgtggcacatagctttcttgggagtaggcactcagagaggccagcagtcccaatgcaatgattccttttttcatattgtctgtcatttagtttccattagttgtttccatgcggccggcaatgcgtctgcaatgtcaccggaggtcataccgattactcccttttgctggcaggcgatgtcaccggccagaccgtgtacatagacgcctaagcggcaggcttcttcgtgtgtgtagccttgtgagagcagtgacaggatgacaccggtaagaacgtcgccacttccggcagtggccatacccggattgcctgtagggttgaagtaagttactccgtcaggggtaatgacagccgtccatgctcctttcagtacgatgtagcattgcaggtgggccgccagttctttcgcctttgacaaacgctcgtagctgttgctgcagcgtccgatgatgcgttccagttccttgatatgtggagtaagaatgctgtggcgaggaatacgggtcaggtagttacggtagctgctgaagatgttgagtgcatctgcatccagaaccaaaggaatatagcagttgcttacctggtcgaacagcgcctgcaccgtgatttcttcctgtcctaatcccgggccgatggctacggcctggaagttgtcgaggtcggcagcttcggcaaagcagcggtcgtgtacgtcatcctgcaccatggcttcaggcacattgctctgtagcaggtcatggttgcatactggggtgtgtacggtgagtagtccgatgcccgaacgcaggcaggcacgtgaagctaacagggcggcacctcccataccgtatgaaccggctatcagcaggccgtggccgaacatgcctttatgggcaaatttctttcttggcttgatgagcgcacgcatttcgctggcttcggtgatgtaatagttcgtcttggctgattcgatgaattcacggcttataccgatgtcgagcaactgccattcgcctaccacatctgcgttttcggcaaagaggaaggagagtttgggcatctggatgctcagggtcaggtcggccttgatgatgttttgtcggatgttatgggtattgtcttctcccatcagtccggaaggaatgtcgatggataccacctgggcaggagaagcattgatgtattgtactacggctgcaaatcctccgctcagcggtttttgaagtccagaaccgaacagaccgtcgattactacgtcgtgactgcccagatgaggcgggtcgaactggttgctgacttcggtgtagttggcaaatccgctttctttcaggcgctggatgttggtgaggcattcttcagaaagggtaccttttacgttgaacaaatagacttctaccggatagtttttcaggaagaggatgcgggctacagccagtgcgtcgcccccattgttgcccggaccggcaaatacgacaagacggtgtgacttgtcatatcgctcgctgatagcttgtgccaacagaccggcagctttttccatgaggttgattgacaatatagattcgtgggcgatggtatatgcatctgcctctttttgttgtgtacaacttaaaattttcattgtatatataaaatagctattttgtcggtaaaagtacgaaaaaagcctcgaatgggatatatattctattgaaaatatctttaaatactcagggggaagtgtggaggttttagggaaaatccgtaaatttgcacaatttctaaaactagattataacatggatacgattcagattaaagacaagcgtttcaaaacgtttatcccagaggcggatatcctgaaggaggtggcacgtgtggccaatgaaatcaatcatgacttggagggtgaaaatccgttgtttttgagtgtgttgaacggctcgttcatgtttacggccgatttgatgaaacatctgacgattccatgtgagatttcttttgtgaagctggcttcgtatgcgggaacggcttctacaggaaaggtgaaagaactggtaggactgaatgaagacatttcaggacgtacggtggtaattgtggaggatattgtggacacggggctgaccatgcagcgtttgctggaaaccctgaaagcacgcaatccgaaagaaatccgtattgctacgctgctggtgaaaccggataagttgcaggtagatttggatataaactatgtggcgatgaatattccgaatgattttatcgtgggctacggactagattacgatggcttcggacggaactatcgtgacatctatacagtggtggaataatttttttatttattataagacaacatgttgaatattgtaatttttggtgctccgggttcaggtaaaggaactcagagtgctcgtattgtggaaaaatatggcttgaaccatatttctacgggagatgtattgcgtgcagaaatcaagaacggcacggaactgggtaaaacagcaaaaggttatatcgacaatggtcagttgattccggatgcgttgatgattgatattctggctagcgtattcgacagcttcaaggatagcaaaggtgtgattttcgatggattccctcgtacaatcgctcaggctgaggctttgaaagaaatgttgaaggtacgcggacaggaagtttctatcatgcttgacctggaagttcctgaagatgaactgatgactcgtctgattaaacgtggacaggaatctggtcgtgctgacgacaatgaagaaactatcaagaagcgtctggtagtataccactctcagactgctccgttgattgactggtacaagaacgacggtaaatattgccacattcagggattgggtactatggacggtatcttcgctgatatttgcgcggctattgataaactttaaataataaaaaactggcgggccggtgacggtctgccagttcttaaacttgaatttatggctgaatcgaattttgttgattatgtaaaaatctactgccgctccggaaagggaggccgtggctcggtgcacatgcgccgtgagaagtatatgcccaacggaggtccggacggtggcgacggtggtagaggaggtcatgtgattttgcggggaaaccgcaattactggacattgctgcacctgaagtacgaccgtcatgtgtttgcggaacatggaggtaacggctcgaaaaacaaaagtttcggaaaggacggggcagataaagtcattgaagtgccttgtggaacggtagtatataatgccgaaacaggggaatatgtgtgcgacgtaacggagcacggacaggaagtcatcttgctgaaaggcggacgcggaggattgggaaactggcatttccgtacagcgacccgtcaggcaccccgttttgcccaaccgggtgaaccgatgcaggagatgacggtgattttggaattgaaattattggcggatgtaggtctggtaggttttccgaatgccggaaaatccactttgctttcttcggtttctgccgcacgtccgaaaattgccaattatccttttaccacgctggaaccgaacctgggaattgtgtcttatcatgaaggaaagtctttcgtgatggcggatattccgggtatcattgagggagccagtgaaggaaaggggctgggactgcggttcttgcgtcacattgagcgcaactcattgctgctgtttatggtaccgggtgatacggatgacatacgtaaggagtatgagattctgttgaacgaactggctacctttaatccggagatgctggacaagcagcgggtgttggccattacgaaatgtgacatgctggacgaggaactgatgcagatgctggaacctacattacctgaagatatacctcatgtctttatttcttcggtgtctggaatgggtatccagcagttgaaagacttgctttgggccgaactgaataaagacagtaaccagttggaagcagtacgtcgggaagccatcgtacatcgtccgaaagatatgaccaagcttcgcaaggagctggaagatatgggcgaagacgaagactttgactatgaatatgaggatgtggatgaggaagatgactttgactacgagtacgaagaggaagactgggaggacgaaccacaaaagtaatgaataatctgactgatgataaaagaatgttggtgtacggcccgaaaagtccgcacaccgacattttttgtttctctactacacgttatggtggttgtagtaaggggaattatgcttcgtttaactgcaatcattattgtggtgatgcgccggataaggtggaacggaaccgggaactgctgtgttcgttgttacctgtgcgtccccggatgttagttatacctcatcaaacgcacgatacggtggtgaaggttgtggatgaggcttttttacggctttcttccgaagaacaattgaagcaactggaaggagtggatgcactggtcagtgatatggaccaggtctgtctttgcatttctactgcggattgtatcccggtgctttgctatgatacccggcggaaagtaattgcggcgatacatgccggatggcggggaacagtgaagcgcatcgtggaaaagacgttggacaagatggcggcactttatggcacgaagggagaagatgtgcaggcttatattgggccgggtatctctttgaatgcttttgaagtgggagatgaggtgtatgaagcctttgaagcagcagggtttgatatggcttgcatcgcccgcagagatgaaaagtggcacctcgacctttgggaagccaaccggatacagttgctgtctaaaggagtaaagaaggagaatgtggaagtaacagggatttgtacctatcaaaattatacggatttcttctcggcacgtcggctgggcattcgttccgggcgtattttgtcggggattatgcggatgtagaaccatttaagaaaatagcgaaatggatttgaaaattgaagtatcagaggaattacggcaggcttggccgctgtttcgtggagccgctgtatttgcgacggtaaagaattctccatatagtgaagaactgtggaaacgtatcggtgagtttacggaactctatcgtcagaaatataccattgattctatcaaagagatgcctgccattcaggccactcgtcaggcttataagaaatgtgggaaagatcccagccgttaccgtccttcttcagaagctttatgccgacgtttgttgagaggactgtcactttatcagatagatacgctggtcgatttgattaatttggcatccatcaatagcggacattccatcggaggctttgaccgggataagattcaaggaaacaagctggtattaggtatcggaaaggcgggtgagccttacgaaggtattgggcgtggagaattgaacattgaggggatgccggtatatcgagatgccgtgggaggtgtaggtacaccgacaagcgataatgagcggacaaagatttcatcggaaactactcatctgttagccatcatgaatgcgtacagtgggagtgacggtttggaggaagccgtaaactatatggtaaacttactgaaagaatttgcggatgctcaggatgtagaactttattattttgagtaatatgaatcgcttgattgtaatacttgggctgttgttcctttgtatgggaaatatacaggctgatgaacctgtgaaaacaggatttacacacatggagcgtagtcatatcagggtgcatacaccgggactgttctcaaagggaaatagcgtggagatacatctggagtgtctggctgattcgcagttctgcttcccacttcccggaggaaaggtcatttctgcttatggaagccgtggtggacattcgggagcagatataaagaccaaggccaatgattctattctttgtgtgttcgacggtgtggtgcgcatggccaaaagttacggcggatatggaaaggtgattgtggtgcggcattttaatggattggaaaccgtgtacagtcataattccaagaactttgttgcaccgggtgattcagtaaaggcgggtcaggtaataggattgaccgggcgaaccggacgtgctaccacagagcacctacattttgaacttagggccaacggacaacattttaatcctggattattatttaatatgtctacccgtgtccctttgaaacgtacgctggtatgtaccaaaacaggaaaacatgtgaaattatctcctaaaaaatgaaagaatatggatattgaaaagatattgacagaaggaattgtgttcagaggcgggaagtcttctgacggaaaaaagaaagaagagaaagtaaagaccaaggctaagaagaaaacttacattacgggtttgcatggttctggctctgccaagatgaaagcggaatatcgccgccggagagccaacagacacaaacaaggataagagtgaacaaaaaactgtattcagttgttaatatatttgtaaaactaaaaaaagaagattatgagaaaattatttttactcgtagtaattgtaatggctgccatcactgccagcgcacaggaaggcatttatttaggtggtggtatcagtttgtggagaaacaatgatgtagataagacttcattctctatcacaccggatgtaggttataacttgagtgaaaaatgggccgtaggtgtggaattggcttatgcacacaatggttatgatggtgataagctcaatagcaatgcgtttgctttggctccgtatgcacgttactctttctatgaaaacaagattgtacgtttgttcttggatatgggatttggattctctacttacaaggcaaaacatgcggattctgtaaatggttttgaaatcggagtgaaaccgggattggcagtaaaattgaatgataatttcagctttattactaaagtaggttttgcgggttatcgtgacgactattatcgtggagaagaaaatggattcggcgtcggcttggatggcgaaaatatttccattggtattgagtacgaattctaataagaacgattgaataattaatagatagggagcaaaaagaggtgaaaacttcttttttgctccctttttatttgtttctccgctttatctttttaaatttgtgtaattcatctattatttgagcttatgaaaaagattgcatgcatagtggcaggtttgttcgtagctttgacaatggccgcacagacaaaagtaacttggagtatggaacttggactgggtatgagtacctggatgggaaaggatgccggagactcttctccattgtttaaccagaaggttggagtaggaattgatgtacctttgagtggactggtatcattccagaccggattatactgggcttcgaaaggagcaagcatagacgtggattatgtaggggctaatacgaagaatgtggtggatatgcacgtgaaccagaactattttgagatgcctttgctggctgcttttcatgtaggtacagccgctaattttgatatggtgttcacagcaggtccttatctggcgtatggggtaaacggcaagcggaatattgacattgatgacttgactgtttcttataatacctttggggaatcaaagattgaaggagaaatcgtctcagggctgcgtcgttttgatgccggtgtgatggctggtgtggcactcgactttaaacgctggacggtaggacttgacggagaatttggatgctgcaaattagccagcaattcaaagacacgcaacttggcattcttcttcactgctggctataaattctaattcttagagattttatgtacgctggatggcctgtaccgtttctttacgggcaggctatgcagcattttgagagctgccaagtggcggtcgcgccagattcggtagctgagcacgattacaagaaaaacagttcctaacagacatacccagccgaacaactctttcaggctggtcagcatggtctgggtgtttacttcattatagagttgtatgactgatacatccggcatccactcgtgcagattgtccatgtctctacttaataacccccagttatcgcgttgcaggtgtttcatccagcggttcaatatggctgctcccagaggggttgcaatgctggtacgaatgaagctgagtacgcacaaagactggaagaaatgcttgaagggtatatgcttcgctacataaatggttagcgaaatataaagcactccatgaccgatgccttttaaaaagttgggcagatacaaactttcaatattcaaatcggggtatatcagaaaatacatgtaatactggtacatgactatcagtgtaaatccgacagagatcaatagtttatatcctttttttaatactgcttgccggaagaatacgatacctgctccagccaggattcctgcaaatacacaccagttcaatgaaatggcatttagcgtatcgtactgtaagatggaggtcatgaatgcattctgcagtacggaggaggtggtgagaaacagacagagcatcaagaacaggaacaacactacggggaatttcttgtagcggaatacctgcgggtctatatacggatgccgtatggaagtcatccggttgatgtttatcaacaaggacactacggctattacaatgcaggagcgaatctgcacgctgtccagccagtcgtaaaagtctccatagatacagataaaaacaatcgcgaacagcatggctgtccataagaggaggcctatccagtctatgccatataagggaatctttttacctaggcggatagtctgtgtcaggcacatgacacaaatccataccaccatcagcatgccgatgacaaaccagtgcatgtattgccagttggcccagtcgttgatgtgcatggtgaccagtccggacaactgtatactttcaagcacgatgatatagataacgggatagaaaaccgagaaatttccggaaggtgtaatgctcaggcgggtattggagaaacactcgaaggtgccccacatgcggaagaatcccgatacgaagcatacacaaatcatgagaaagatgttttctgtatgcatggtaatcaggttgcagagaatgagtaccgggcataccgtcatgaaaatggaccgggtggtaaaccgggatttcagacggaacagtatcggaaatataacggtcataccgatgaaagaggcataggctgccatggttacatcttcctggatacatcctaatgcactcgacatctgggtagcagctggcaggaaaactcctccgttaaactgaaagaccatggcaaagaagagcgacaggacgatgcagaccggagtgggcaggaattctttgaagtaaggaatctgaggacgtggttcagccattttcgtgtttactgtttaacgtaacattctacattcattccggctctcaagcgttgcaaatcttccgggcggttgttttccgtaaactcgatacggactgggatgcgctgttttacctttacgaagttgcccgccgagttattttgtggaataagtgaataggaagctccggtagcatccgaaatagaagcgatacgccctttaaattttacatcaggaatagcatctactcttacttccaccagctgatttctcttcatgtcggtagtctgagtttccttgtagttggctatgacccatttctccgtaccatctaccaaagtcaccaaggcttgtccaggctgaactaactctccttcatgaatgttttttcgtccggtcactccgtctgtagtagccagaatcactgtataagagaggttcagtttggccaggttgagtgcagcctctgccagtttaatagccgattcattctgttccaatcgctgggtttgctcctgcttctggagtaaagtcgattgtttctggcgtaacagctgttcatagcgtgcctgtgtagcttcgtaatccgtttttacccggtcgaattgttgaggagtaacggcttcttctttcagcaattcctgatagcgtttgtaatccgtctgtgcattttgcaggcgaatacgctgctcatcaatggctgcatccgttacgaggatgttgttctgtgtggtgttgatagtggtatgcatggcactctttccggccagtgcattgcgatagtcggcttcggcctgtgccactttcagacggtattccgtatcttctatgatggccagggtatctcctttttttacagtctggtattcctcaaaacagattttcttgatgaagccctgtacccgtgtgctgacaggagtcaggtgttgcttcacctgagcattgtctgtatattccacactacctaaatggataaatttgccgcaaacccagctgataccggctacgaggaccagcagtataaagaaattagaaatagctctttttttgtttcgcatcatatattttttcgtttttgtgtaaatatgaaattcattaaagtgttcccgtaatttttttcagcaggtaatattgatacaatatacctatctgatagttggccagctgcaattccatgtccagctgcatgttgctggcatccagcatatcggtaatcagtgacagaccgttcaggtaacgttgccgcacgatgcggaagttttcatgtgccagctgtacgcttttttgctgagtctgcagtcttacgtacgcttcattcaggttcacgtatgcttcgtgcactttattttctatttcttctttgaccagctggtagtttttttctgcttttgaggtagctatccgtgcctgtttcagtttcttcttgctcttaaacaacgcatccagattgtacgagatacctactccggcaaaccagtagttgaagttgttgttcaatggcgggacttctactagaatcggtccgttaaattcattggtagctgtcagactgatgtgaggtctgcgttccgaacgaatcaagttctgctggttgtgggtcagcttgatttccgtgtgtgcctgctggagttcaggagattcctgagaagcttccatccaggtcgtttcctgttgtttgtccacattgatacggaacagtgctgtggagtcgggtacaatatgtaccgaagggtccagtccgatagtagtcgtcagcttgtggttcaagacattgagcctgttgatagtagaagtcaggcctaattgcagattctgtaactgtagttcataacgggtaatgtcactcttcagtgccgtaccctgttgataggcagcccgcatatcctttaccaatagatgtgtctgctcaatgttcttttcgtagaccgtctgttgatttctcagttggaacaaatccagataatatcccaacagcatgaagcgcaaatcctgctggttgttttgataagtctgttgtgctagttgctgttgcagtttcgctttctggatgttggcattgatacttcctccggcgtagatagtctgtgaggccttgagtacaaaagaattaccgaaatgcggcatgtcagcatgtatgccgttactgaaatcccggtctgtcatgcaaccgtcaccaatatagttgaggtccacctgtgcccggatggagggaagtttggcatttttagccacttctaccgcctgtgtcgtttcgtcaatggccagtgaatgaagctggatgcttttgctgttctggtctgccagttgaaacaattcatcgatagaaagaacccgttcttgtgcggcggccgtgtaaataaaaaaggaaagaactccaatagttgaaactaatcttttacccattattctttttgtgttgaaaatacctttagccattttatttggctgtgcaaaattaagccattatttttaggctgaatttgcggtttatgcaaaaagattaccattttaagccatcctcagagaatgaatcaggaacaggaaagctatatctcgctgataaagcagacgagtaaggagaccatccgcatcaagaaaaccggatgggaagaaattaaactgccgggccatgcacatgaaaagtgccagattatctataccctttccggcacgttgcatgtacagataggttccacaagctattttgtgccagagaagcacatcgcctggatacccggctgtacggagcatgaattatccagcaagaatcggcaggtgtcactggttattttctatctgtcgctggatgcggatgacaaggatactgccttgaaggaattctccatttatcacaccaactcctttattgcagagaacttgaaatttattgcttccaaggggacggagatagaacaggctgattctcccgatttgtatgcctttgcactcagctttttcaaactgctgccctccatcagccaggatatgggctttttgttgaagatgctggccattcccaatgatgcacgtttgcatcctattctggcctatctgcaggagcatttgcatgagaatttgaagatgccgcaactggctgcccatttcggattctctgtgcgcaacctgagccgtttgttcaatgagtcgggcatacgtttcagctattatgtgaacaatctgagaatcatgcgggctatcgagctttttgccgatgggggaaggaccatgcaacagattgcatacgaagtaggttttgccactcccaaccatttcaatcgtgtgttccgccagattacgggcgtatcacctaatgcttttgtaaaaaatgactaagtccctttctctgcctgaaacaggacaagagaaaagaactcagcgatgagtataaatcaaatcagattatacgtaagtttccaggaaagatacttctccttctggtacaacttccaggttctgggtagtagccgggaacaatactgattcacctgcttttacgctgatgcggttgccttcgttgtcagtaacggtgcaggctcccttcatgcagatgtaaataacaaacgaatccagttcgctgtagtccatgttcatggtttctgtcaggttgtaaacagaagtggtgaagtacggacagcttaccagttccaccggttcgtctttacgcggttcatagtgtgtacgataatcatcagatacagtatagtcgatggcatcttttgagagttccgtatgcagttcacgcaagttaccgttcttgtctctgcggttgaagtcataaatacggtacgtgatgttggaagtctgctgtatttctgccaggaagcatccggctccgatgctgtggatacgtcctgccggtaagaagaatacatcgcccggctgtacgtcatatttgtcgagggcatcacaaattgtattgttttcaatcatgtcggcatattcctgcggagtaatctgttttttcagacctgaatacaagtgtgcctgtccgccggtattgtcgatgatataccacatttctgttttacccatagactggtggcgcttcatggccagttcatcgtcagggtgtacctgaatagacaaatcctgcttggcgtcaataaacttgataagcaaagggaatttgccctggaatcgcttgtagttttcttctcccactagctttcctttatattcttccatcagctgagtcaggttcttgccggcatctgcaccttctgctactacagattcgtcgcccggtacgtctgagatttcccagctttcgcccacttgttcctgctgatagtccagttgtttaaaaggaataatacgttctcctccccaaagggtcgattttaaaataggtttgaatttcaaaggatacataatcttatttattttggtctgtacaaaaataggaaaaactatgattataccttatataattggggagaaaaagaagatatgaagtattcttttgatttctcaaatcagaaatacaaacgtaatctttgcgtaaatgaaatgtacatctcatgaagttctgctgtaacataaacactccatctttgcaacggaaaaaagaaatgcatgaatagattatgagattaggttttaaggagattgtttttgtttcaggtttcttagcttgttctactatgccgatggtagcagagactataaaaggtaccattgtagacaagcagactaaagaaccattgacgggagctaccgtacaagtacttggtactacagtaggagcagtagccgatcttgatggaaattatatcttagatgttcccggtggggagtatgaactggttgtgaaatacgtgggatacacagatattaaggctggggctgtaaaagctaaaggcaaagatgtggtgctgaactttgagatggaaagcgatgcacaggccttgagtgaagtctccgttgttgcacgtaaaaacctggaaggggaacgtgcgttgagcatggaacgccagaaagccactgtagctattgaaaaccttggagcaaaagaaatgagcgtgaaaggcatcagtaatgtacaggaaggcgtgaagaagataaccggtatctcgattgccagtgcaggacagctgattgtgcgcggattgggcgaccgttatagtacgactaccttgaacggactgccgattgcttctccgaatccggataacaaactgattccattggatttgtttccttcaagtacggtacggaacattacggtaagtaaggtatatgaagctggaacttttgctgattattcaggagcacacatcgatatcagtaccaaagaaaataccggaaaagactttttctccatcggtttcaatacaggaggccggttcaatacaattttccaggatttctataaaatggatcagcagtattccttgttccgtaatccgggtattaatcagaagtacattgacatgcctaaggcggatttttctactgccattacgaaggaaaatccttttcatacaacattcgatgtgaataagagtacaagtcttccggaatttggaggtaatatagccggcggaaagaactgggatgtaaatggacagaacctgagtctgttggctgcattgagcgcaagcaataccaatgaaaccacaaaagatgctttttatcgcacacttgaagccggaggtacgactctcgaccagtttaattacgatagttaccgtcaggaactgaaactggcaggacttggtaacctggcttatacgcttagagaggccgaccgtattggatacaccttcttctatgcgcgtaatgcggagaatacctatatgttgcgacaaggagaagactatgaagacaatgaactgataggtaacaactctgtaacccacatttatacccttcaaaatcatcagttgaatggacaccatgagtttggaaagcagtgggatttgaactggagtggttcttacagcaagacttccagcgaagagcctgaccgcagacaggtaatgtttgaaaaggctggaaactctctggaactgttcgatttgaacaagcaggagaatatgcgttatttcggctcgctgaatgaagaagaatgggtgggcgatttgcgaagctcttatcgctatggtgacaataacctgatacgcatgggagctacttacaaagacaagagccgtacgttccgttctacacgtttctactatgatgtaagccgtttcaatcctgagatagaggatatttaccagacttccagctttatgggctatgaccatattgccaatggagacattactataatccgtgaccagcagccgaaagaccagtatgatgccgggcactccatctatgccggatttattgacgcggaatattatccgacggccaatttcctgatgaatatcggggtgcgttatgaatatagtcaccagtgggtaaattatgcgacagacggaggtgaagccaaacggaatgaagtgaactgccatgacttcttcccggccatgaacttgaaatataccgtgaacgataccaacagcctgcgcttctcgttctcacgtacggtaacccgtccgtcattcattgaaatggctcctttcctctatcaagaatcgtatggagcagccatgattcgaggtaatgcagaattgaagaacggatataactacaatatcgacctgcgttacgaacgtttcgaccagcagaacagtaacaatatgttctctattacgggttatgcaaaaatcctggaagacccgattgaacgtacacagaccttgtcgggtggtgcggctgttcactctttccagaatgcagatacaggtgtggctgccggagtggaagtggaattccgtagagaactgtttcgcgacttccgcataggaaccaacgcttcttacatgtacaccaacgtacaattgccggaaggtggggcctataccaacgcacagcgttccctgcagggagcttctccttacctggtgaatgcggatatcagctatgctcctaagtttaagaacgatacacagctgactgctacgctgctctataatttgcaaggaccacgcattcatgcggtaggtatttccggattgggcgacgtgaaacaggaagacttgcatacgctggatttcgtagccacttacaagctgaatgaccactggaactttaagttgcaaatgaccgacttgttgaatcaggacatcgtcttcaagcaggaagtgaaagacggcagaaagctggaagtggaacgctacggaagaggaactacctttgagttaggttttagctatacattataaaaattcataaaggaaaaaattgaacactattctaaactttttattaacgagaaaagtatgaaaacaatgaacttgaaatttatgtcgatggccgcaatcgctgctatgactttgtgtactgcttgtagtgaagatgacaacactccgaatccggaacctcctgttgcagatgcgtattcttcagagttgttcttgactgtagcaaacaacaatgcaattaattacaatttcagcaatacatttacaaataaatttgtcggtacgattgacggtggagccgacatgacgaaggtagataatttcttcgaagctgctgcttatcgtggtgctgttcctgctaataatgactggacagccggatggattcgtacaagcggaaacggtgatgaaacaagtgccaatgctgaagaaattctgcaaggcgaactgactgccaataagactttattgaagaataaagtatatgcacttagtggtgaatatattgtgaagactggcgctacactgactattgaagaaggtgtgaaaattgttgccatgaccgacgatgaatctgtagattatatcttggtacagcagggtgctaagattgaggctgtaggaacaaaagaaaatccgattatcatgacttcagataagaaggaatctggtgcatggggcggtttgcacatctgcggtaaagctcataccaatgcagaaggtggtaccggtaaatcagaaatcggtgatgcagcttatggaggttctgctgacaatgataactctggtacactgaaatatattcgtctggaaaataccggatatgcattggattctgaacatgaagcaaacggtatttctttctatggcgtaggtaacggtactacagtagaatacgtacaggcttacaatggttctgacgacggttttgaattcttcggtggtagcgttgacgtgaaacacatggtagtgaccaactgtagtgatgactctttcgactggactgaaggatggaacggacgcggtcagttcctggtggcttatcaggaagcaaaggaaacactcggatttgattgcgactgcttgatggaatgcgataataacggtaagaactttgcagccactccggtagcttgtcctactttggctaacctgaccttgattggcaacggtggtgagaaacagggtgttcgcttgcgtgccggtacacaagtgaagatgtacaatgcactgatttctggtaaaggaaaatgcttgacaactgaaactacagaaacagaaaaggcattggtagacggtacatctgtattgaactacgtaactttggctacggatattgaatgtaacggtgctgaagaataagaaatagatttcatttgattgatggtggtctgtcgggagaaatagctcggcagaccgcttcttttttattggagaatgaaatgcattttcccatcttcttctccgtgataggaaaagccttcccactcaaactctttcagctgttccggatgtgttatccggtttttcaggatgaagcgggtcatttcgccccgacacatcttggcgtagataactaccgtgctaggtttcccgtttttcagggtatagaactcgggcgtaacgacctgtacttcccgacagactttttcccagtcgaacaagtctttcatttcaccactggccaggttgacaagaatgcctccttgttgccggatggcatcaatgaaatagtccgtcaacaaagggcgccagtattcaaacatggttttccgttcgtgttccggcaatcgtacattgccttccaagcggtaattctgaatactgtccagcggacggagcaatccgtataagaaagaggtaatcaacaaatgttgctgggcataccggaaatcttctgcggtaaagtctgccggatggatgcgcttgaacacgatgcctgtgtaagctaaaagagccggcagggcaggagtctccggtgaaaggaactcgtggtagcgcagatagttttcggctgctaacttcggattcactgtcagcatctgagccagctcttcggcagtaaactgggtcatgtacaaggcgttttcgcgggcctctttcagaaaatgaggagtagtggtttctggatatggagttttgctacgtgcggtcatggtcttggcacacgagataaatgtcatcatacgcgctcttgtttttcgttaaaactatttacaaagatagactccttggcggattttccagcggtttacggtatatttgtcagggtttaacattttatagaaaggaaagaacaatgaaaaatttacggatttggagccttttgtgtctgatttggatgggcgtactggctgcttctgcacaagacaccgggaaagaaaaaatcagtttgggtgatgccatgcctgccattaccctgagttcggagatatatggtaaagtgacacctgccgatttgaaaggaaaggtagtgctggtcagtttgtttgctacgtggtgcggtccttgtcagatagaactggctgaggttcagaagactttgtggcccaaatacaaggataacaaggatttcaagctgttagttatcggccgggagcatacggatgcagaattgaaaaaatacaatgaacggaagaagttcagtttcccgctctatccggaccctaaacgggaggtcttctctctttttgctgatcagacaatccccagagcgtatctgttcggaaaagacggtaagctgattcatgcctcaataggttatacaaaatctgaatttcaagaacttatggctgatatagaagccgctttgaaatagtgtctagataaattatattgactaagctagtatactataaattttttaactacctttgcaatatctggctaacctagaggggtggctggatgtttataattgttaattatataaagaaaggcgtttacgaacgttatcttctgcgtctcgaatctcgcaaatttgaaccgataggaagataaggcaacgaaacgcccactaaggtgtattatcaattttaccgtgtatatatgcacggaaaagtctgtataatatcatcttggcgtgggctggctgcgttgcttatctttgtcggtgaggcaatgcgagagccagagacgcgagataagcgagtacagactcccatgccttttttattttaatagcccaatctggggagactataggcacaataaaagaaacttatgaaaaagttattagagaaatggaagggaattgtaacccttgttttggtttcccttagtctttattcttgtaaggatgatgataattcgggtatttcaacagaaagtattattggtgtttgggagggtataaaggctgatagttggtcgattgtaccggcagctgaggcaacagaaggatggtggggagaacgtccagataaagattcgcaatatggaacagatatatcagattatcgcgtggagtttactgccgacatgttctatcgcgtttatacttataatgaatatacagataaatggagccgaggtgctgttggcaaatggagtgtatcagggaatacgctgacgatggtttcttattacagcaatgcatacgatgaagagaatcctgaaatttttcaaattgtggaacagaatgaaaccaaaattacgttggaatattataagaacacacctgagaaagaaaagtatagcaaatcgactttcagacgtattgctgaccgcgaagatatgttcgaggaagaagaaaccaacacctcaaatagtgatgaatatcccatctcttttcctcaagagcatccagtgaagtttgtggggaaatggaaggaagtggagaaagaggagcaaagtccttattccattcttacattgaaggaagacgggagtgctgctttggtattttattttgacaatgggacacaattgacagaagatggttatcgctggacggctggagatgatttattctgtcttgatcagactgatgattgtggttatcaaatttactatattaaggaatttacagatgattgcttagtgatagaatattctgggtatgcttataatgatcgatttgaacaaggtttttctcaggcctatcctgattcaaaaggaaaaattaaaacttatgtgagatacataggagagtaataattttatcttgtttttatttgaattcggtagatagaaaaaatacctttacgtttggtagaaaatgtaagataaaggtatatgaaaaaaacgtccttgcgtttaagggaaaacgcaaggacgttttagttgaaacgcaagtgcattttacttcaaacgcacttgcgttttaatctaaacgtcaaagcgttttgtttcgagcgctttgacgttcttattttctacctttggtatgccttatttatattcctgccagctcttaatctggatttcattctggttcatgtggcagaatgcttcgatgaacgctttggccagacgggcgttggtaatcaacggaatgttgtggtcgatggcaccacggcggatgcggtaaccgttggtcagttcccgtttggtgtggtttttcgggatgttgacaatcaagtcgaacttatgttccgcaatcatcttcatcacattgttttctgcattcgggcgttcatccggccagaacaccggagtagtggtaatgccgtgagagttcaggaaggcagccgtaccagctgtagcatagatgttgtatcctttctggtgaagcatctggctggcatccagcaaatcgactttcgacttggtagcaccggaagagaacagaacggactgtttcggaatcttgtagccggttgcaatcaaggcattcagcaatgcttcatcgaagtcgtctcccaagcaacctacttcaccggtagatgacatgtctactcccagtaccgggtcggcattctgcagacgggcgaatgagaactgagaagcttttaccccaatccagtcgatgtcgaacgccagtttgtcaggacgtacgtaaggagcatccagcatgatacgggtagccgtttcgataaagttgcgtttcaatacttttgatacgaacgggaagctacgtgaagcacgcaggttacattcgattaccttcacatcgttgttcttagccaggaactggatgttgaacggaccggagatattgagttctttggcaatcttgcggctgattttcttaatctggcgggcagtagcaaaatagatgtgctgtgccgggaagacaagtgtcgcatcaccagagtgtacaccggcaaattcgatgtgttctgaaatggcatattccacgatttcaccgttctgtgccacagcatcgaattctatttccttggtttcctgcatgaattgtgatacaactaccggatattcttttgatacttcgctggccatttgcaggaagcgttccagttcttcctggtcgtagcatacgttcatggctgcaccactcagtacgtatgacggacgaaccaataccggataacccactttcttgacaaagtctttcacatcgtccaggctggtcagttcctgccaagccggctggtcgatgcccaactggtcaagcatagccgagaacttgttgcggttttcagcacggtcaatagaaataggagaggtacccaataccggaaccgactggcgatagagtttcatggccaggttgttcggaatctgaccacctacagaaacgatgacgccgcgcggttgttccagatcgatgacgtcgagtacgcgttcgaatgacaattcgtcgaagtacaggcggtcgcacacgtcgtagtcagtagaaaccgtttccgggttgtagttaatcataatagacttgtagcctaacttgcgggctgtctggatggcatttaccgagcaccagtcaaattccacagatgaaccgatccggtaagctcctgaacccagcacgatgactgacttttcattcttgtaataattcacatcgtatccttctacggcatacgtcatgtacaagtagttagtcagttccggatgttcggaagctacggtattgatgcgtttcacggccggaaggatacctaatttcttacggtaagaacgaacggccagattttccttttccatgttaccctgctgaggcttcagtacgaagcgggcaatctggaagtcagagaatcccatcacttttgcttcacgaagtacctctgccggaagttcttcaagcgagttgtaggttgacagtttatgcttgtagtctacaatatttttcagtttgccgataaaccacgggtcaatcttggtcagttcatagatgcgttcgatagagtaaccttcttccaatgcctgtgcaatggcaaagatacgcaagtcagtcgggttggccagttcatcatccaggttggtgaagcgggtgtggtcattgcccacaaatccgtgcatgccttgtccaatcatacgaagacctttctggatgatttcttcaaacgtacgtccgatagacatgatttcacccacagacttcatgcttgaaccgatgcggtgagaaactccggcaaacttgttgaggtcccaacgtggaatcttacaaatcaggtaatccagttgcggagctacgtaagcagagttcggtgtacccatttctccgatttcatctaaggtatagcctaaggcaatcttggcagcaacgaaagccaacggataaccggttgctttggaagccagtgcagaagaacggctcaggcgggcatttacttcaatgatacggtagtcattggtttctgcattgaacgcatactgaatgttacattcacccacaatgttcaaatgacggatacattgtttggacaaatcctgcaacatggttacctgttcttcgcttagtgagcaggtaggagccactacgatagattcaccggtatgaatacccagcgggtcgaagttttccatgctggccacggtgaaacagtggtcgttggcatcgcgaatcacttcgaattcaatttctttccagcctttcagtgattcttccaccagaatctgtggagagaaggtaaaggcactttcagccagttcgataaatttttcttcatcggggcagataccacttcccaatcctcctaatgcgtaagccgaacggatcatcaccggatagccgatggtacgtgctgcttccaatgcgtctttcatgttttctaccgcacggctgaccggagttttcagagatttctcgttcaacttcttgacaaagaggtcgcggtcttctgtatacataatggcgtctacggaagttcctaacacttctacgccgtattctttcaatatacctttctggtaaagttccgtaccgcagttcagggccgtttgtcctccaaaggccagcagaatgccgtccggatgttctttcttaataatctcagttacaaaataaggtgtaacaggcaggaaatatacttggtcggcaattccttccgaagtctgaatagtagcaatattagggttgataagtaccgagcggatgccttcttcgcgtaaggctttcagtgcttgtgaacctgagtagtcgaattctccggcttgcccgattttcagtgcgcctgatccgagaaccaggacttttttgagttctttcttcatggttatagataatttgttgtggtatcgttaaaggtagtccctgtcaggcagatggtttgtctgcagagacctcttgcaaagaaacgatttattttgaagaaaacaaaggatttatatatctttagagaagataggatgcggttcgaaagctctttcactcaaaagcaagcttttggcttggagcttcgctcacctttcgctatctttgctgcaatttaaaaatgaacaatagcttatattatgaaaaaggaaaagattatcttgaccggtgaccgtccgaccggaaaattacatatcggccactatgtaggttcattgcgccgacgtgtggaattgcagaattcgggtttgtatgataagatatttgtgttcgaagctgacggacaggctttgacggataatattgaaaacccggaaaaagtacgtcagaacgtgattgaagtggctttggactacttggctgccggacttgaccctgcaaagtcaaccatctttattcagtcgcagattccggaactctatgaattgagcttctattttatggatttggtaaccgtatcgcgcttgcagcgtaatcctacggtgaagactgaaatccagatgcgtaacttcgaaacaagtattccggtaggtttctttacctatcctatcagccaggctgccgatattgcagcattcaaggctactactgttccggtgggagaagaccaggaaccgatgattgaacagacacgtgagattgtacgccgtttcaaccatatctatggcgaaacactggtagaaccggaaatccttcttccggacaatgcggcatgtctgcgtttgccgggtacggatggaaaggctaagatgagtaagtcgctgggcaactgtatctatttgtctgattcggcagatgaggtattgaagaaagtgaagagcatgtacactgacccgactcatatcaaggtaagcgatccgggcaaattggaaggtaactgtgtgttcacttacctggatgctttctgccagacagaacattttggacgttatttgccggaatatgctaacctggacgagctgaaagcacattacactcgcggtggattgggtgatatgaaggtgaagaagttcctgggagctgtcatggaagaagtgttggaaccgatccgtacacgtcgtaaggaatttgaaaaagacattcctgccgtatatgatatgttgaaaaaaggttgtgaagtggctcgtgaagctgccgctcagactatggatgaagtgcgccgtgccatgaaaatcaactattttgaagatgcggcattgattgaagagcaggcaaagcgcttctcagaacaataagaatatggatattgaagatctatacagccggtttacggagtgtaacggactgacgaccgacagccgtcattgtccggagggttctatgtttctggccctgaaaggagaaacatttaatggcaatgcgtttgcggcacagtcgctggcacagggatgccgttatgctgtggttgatgaaccacagtatgcatcacaggagaatccacgtatcttgctggtggaaaattgccttcagacgctacagcagttggccaattatcatcgtcgtaagttggggactcgcatggtgggagttaccggtaccaacggaaaaaccactacgaaggaactgattgcggccgtattgaaagagaaattcaatgtgctctatacacagggaaatttcaataaccatattggcgtgcccttgaccttgttgcgcctgaagccggaacatgaggtggctgtcattgaaatgggagccaatcatccgggtgaaatcaagacgctggttcatatagctgagcccgattgtggtattattaccaatgtgggaaaggcgcatctggaaggattcggctcttttgaaggagtcatccgtaccaagggagaactgtatgattatcttcgggaaaaaggaaatgccactatcttcattcagaatgagaatactcatctgaataaaatcgcagaaggactgaattgtattcgttacggacagacttcaggcttggatgtgagtggagcagtgctttcttgttccccgttcctgcattttgagtgggcggctggaggggcgttacacgaggtgaagacacacctgataggagcctataatttggataatgcattggccgcggttgctattggtcgttatttcggcgtggaagatacacaaatctgtcatgcgctttcctcttatgtgcctcagaacaatcgttcacagctggttcagacggaatccaatacgctgattgtggatgcgtataatgcaaatcctaccagtatgatggcggcgttgcttaacttccgtcagatggaagccgagcacaaggtggctatactgggtgctatgaaagagctgggtgaaggaagtcgggaggagcatcagaaagtagtggacttcctgaacgaatgtcagtttgaacgcgtgattttagttgggccggagtttgccggactctctgcttcgtttgaacattatgagaatgtgaaggaggtagaagctatgctggctgctcatcctgttcagcattgttgcgtgttgataaaaggttccaatagtatgaagttaagtgaacttccagcttgtctgtaagaaatattatttttttgcgaacagtccgtatttgaagtagacgctttgaatacggactgttttttcattcgtatctcaaacatttgaatagaaatatgtgacgattctgtcaaaataaggtgtaatttgtccattcagtttcccttgcccgttttttatccctccttgacgaaattttcgtacttccttttatgtgaaaattctatttttgcaaaggaaacttaatggataaactatgaagcgcatttatttattttttataggacttcttgtttggggtgaaattttagcacaacaacttgtaaaggtgggtgacggatatagttctacttccgtcaatacgaccgtgtttcgtaacagctcgctagttacggatggagaaatgcaatacatctcttattatgatgcagacggatatttgactgtaggtaaacgtgttttgggaactaccggatggacgttgcaccgtagccaatataagggaaatgtagccgatgcacataatgtcatcagcatgatggtagatggggacggttatctgcatctttcttttgaccatcacggtaacaaattaaattattgcaagagtacggcacccggagctttgacgttaggagaaaaagaagcgatgactggtgaggatgaagaagatgtaacctatccggagttctatcggatgccggatggtgatttgttgtttgtataccgttcaggagcttcaggaagaggtaatttggtattgaatcgttatgatttgaagagccggaagtggacacgtgtacaagatgtgttgattgacggagaaaatcagcgaaatgcctactggcaactatatatggataaggctggagtgattcatttgtcatgggtatggcgtgagacctggatggtggaaacgaatcatgacctttgttatgcatattctcccgatgagggaaaaacatggtataaatcgactggtgaaaaatataccttgcctatttgtaaggataatgcagaatatgcttgccacatacctcaaaacagtgagttgataaatcagaccagtatgagtaccgatgcggaaggacatccttatattgtgacctactggagagatgcagacagtgaggtccctcaatataggctggtgtggaacgacgggaaaggatggcagaaccgtcagattatgaatcgctcgctgggattctctttaaaaggtggaggcacaaaaatgattccgatttcacgtccacgtattgcggtagataaagggaaggcttattttgtgttccgtgatgcagaacgtggcagcaaggtttctatggcttatacagatgatgtgaaatcgggtaaatggcaggtgaaagacctgaccgatttctctgttgatgcttgggagcccagctatgatacggagttgtggaaaacacgtcggaaactgcatgtatttgtgcaggaaacacatcagggggacggggaaaaagtcaaggcttccgaggcaactcctgtgtatgtattggaaataaattaatctcaaaataaaactatgaaacaggtattcaaattgttactggcttgcgctgtcggagtattgccgatgtcggttggggccaaagattccgaagcgacagaggttcggaaaatgattgataaggtaaatcagcattggcaggtagaaaattcgccggaagtacgttcattctgggataatgctgtatatcatacgggtaatatggaagcctatttcctgacgggaaatgagacttatcgtgcttattctgaaacttgggcaaactacaaccagtggaagggagcgaagagtgataaccgtgcggaatggaaatattcttatggagagtcggatcagtatgtcctttttggtgactaccagatttgtttccagacttataccgatttgtacaatttagctccggatgataagaaaattaaacgtgcgcgtgaggttatggaatatcagatgagtacttcacagaatgactattggtggtggagtgatgcgttgtatatggcgatgccggtaatgacaaaactttacaaggtgactcataacacgctgtatctggataaattgtatgcttatttgcagtattctgacagcatcatgttcgataaggaagagaatctttattaccgtgatgcaaaatacatttatccgaagcacaagacggtaaacggtaagaaggatttctgggccagaggtgatgcctgggtattggccggactggctaaagtgttgaaggatttgccggaagaatataagcatcatcagttctttgtgaataagtttcagaagatggctaaagccgtcgcagctatccaacagcctgaaggttactggacacgtagcatgatggatccggaatttgcaccaggaccggaaaccagcggtacggcactgtttacatacggatttttatggggtataaacaatgggtatttggaaaaagatatatatatgccggtggtgcagaaggcatggaactatttgtcaaagaaagcgcttcagaaagatggaacggtaggttatgtacagcctatcggtgaaaaagcaattcccggacaggtaattaatgcaaaatctactgctaattttggcgtaggagccttcttgctggcagcttgtgagtatgtgcgttatttggaagcttctcaaagtgccgatcgtgcttactggtgtaagttggcttatcagatggcttatccggtattgagcaacatggcaaaaggagagttgcagaagaatatgcagctggaagttagtcccacatgggatggccgaaacaaaaaggtggcttatatggaaacgttcggtcgtttgatggctggtatcgctccttggctgacgctgccggatgatgatacagaagaaggaaagatgcgtaaggaacttcgtgagatggctttgaagagctatgcgaatgctgtagacccgcaaagtccggactatttgttgtggagacaggagggccagaccctggtggatggtgcttacgtggcagaaagctttcttcgtgcttacgatcagttgtggaaaccattggatgaaaccactaaaaagcgttatatagaagaatttcagcagttacgtcgtatagatcctccttataccaactggctgttgttctcatctacgatagaaagtttcctggcaaaagcaggagcttcattcgatgaatatcgtgtgaattcagctattcgtaaggtagaagaatggtatacgggagatggctggtatgccgatggtccttcttttgcattcgattattacagcagttatgtgttccatccgatgtatcttgaaacccttcaggctatgaaggatgcaaaagtgcgtagccggatagattatggaaagtattatgaccgcgcattgaaacgtgcccagaaatatagtttgattctggagcgtttcatttctccggaaggaaccttccccgtattcggtcgttccattccttaccgtatggctactatgcaacctttggctttaatggcatggtatcaggagttgcctgcaggcgtaagcagtgctcaggtacgctgtgcattgactgcggtgatgaaacgtatgtttgccagtggacacaattttaatgaaggtggtttcttgaccatcggatttactggacgtcagccgaatgtagccgactggtataccaacaacggaagtttgtatatgacttctctggcattcttgccgttgggacttccagcttctcatcctttctggactgatgcaccacaggaatggaccagcgtacgtgcatggggtgaaaaacctttcccgaaggatcatcattggagagatgaaattcgtacatgggatttgttctaagaaactatatagttttgtaaataagggataatgaactgcgaccagactctttgggtactctcataagagcctggccgcaagtgttatatggttttgaatacttcattttatctgattttttatagaatatgaaaaaaacagggttattatctttttggggggttgtttgcttgttacttcataccgtaaatgcacagtcactggttaaaaaatcagttccactggattctattcgtctgagtgatccttgtattctggcagatgtgcagacgcagatgtattatatgacaggcacaggcggaaaattatggaaaagcaaggacttgaaacgttggaatggaccttatgaagtggctcaaacagatcctcattcatggatgggcccaaagccaataatatgggctgctgaactccaccattataaagacaaatattattattttgcaactttcactaatacctccgtaaagatagataccgtaaaaggaaatgtgatagagcgcagggcctctcatgtgttggtcagcgataaaccggacggaccttatcgcccgatgcaggatgctacttatttgccggcagataagccaaccttggatgggacattttgggtggatactgatggaaagccttacatggtgtattgttatgagtggctgcagaattgggatggtaccattgaaaagattgaattaaaaccagacttgagtggctctataggagaaggtaaactattgtttcgggccagtgagtgtccttggagtcgtgaattgcaagacggaaaggaagttcccaataaagtgacggatggtccctatctgtttcgcacggctaaaggacgtctgggaatgatatggacaagctggatttataatgtatatactcagggagtagcctattcggaaagtggtactttagacggaccttggatacaagaaccgaagcctataacacctcccgactttggtcacggtatgttgtttcaaactttggaaggaaaatggctgatgtctgtacatagccataaagatgtgaatggagtatatattcgtattccccatttgtttgaagtggacttatcgggtgataaactgacggtcgggaaagagtatcaaccatagtagaatgaaattatcgtttaattttaatttatatcaatccatgagaaataaattcattaatcttttaggaagtatttgtttttgttggggagtggtggcatgtacggccgaacctcctaaagaaattcgtagtggtgaaatctggcctgacaatcagggagtacatgtaaatgcccacggaggtggtgtattgtatcacgatggaacttactactggtatggtgagaataaatccgactctaccagcagtgccatggtgggaattatgtgttactcttcaaagaacctgactgactggaacaacgaaggagccgtgttacctgttgtgttgaatgattctaccagtgacattgtacagggatgtgtaatggaacgtccaaaagtaatctataatgaaaagacgaagaagtttgtcatgtggtttcatttggaattgaaaggaaaaggttatgcggcagcccgttcagcggtggccatatcagattctcctaccgggccgttcaagtatattcgttcggaacgtattaatccgggagtgcttccttttgatatgaatgaaacacagcgtgccatgctcgatacattggatgcggaaaaatataaggaatggtggacaccgatgtggtatgaagcgattcacaaaggcttgtttgtgaaacgtgacctgcaaggtggacaaatggcacgtgatatgcagctttttgtggatgaagatggaaaagcctatcatatttactcgtcagaagacaatctgacactacagattgcagaattgagcgatgattacctgactcatactggtaagtatgtgcgtatggctccagccgggcacaatgaagcacctgccatattcaagaagagtgacggtacatactggatgattacttccggctgtaccggatgggatcctaatgaagcacgcatgttctctgctcccagtatttggggaccttggacacaacatccaaatccttgccgtgggaagaaatcagaaatcacttttggcgggcagagtacctatgtccttccggtacctggaaagaaagacgcctttatctttatggcagatatctggcgacctaagcatccgagtgatgcccgttatatctggttgcccatacagtttgaaaatggagtgccttatatcgaatggatggatagctggacactcgatttctttgataagaaatgatcaaaatcatcaatgcctgttgagaatatttctcggcaggcattgatggttttattgtgtatagagataaaattagttctgttttctcttcagatattcagtgggagccattccatactcatctttaaagcattggcggaagtaagctacactactgaaacctgttaaatcagaaatttcagccaacgaatactttccttcgttgatgagttccatgccttttttcatcttgattttccggacatactcattgacggtcatttcggttaatcctttgatttttcggtagagagtagaatgactcatgcacattttatcggcaatgaacgctacatccattttttccatacatagattttcttcaatgatggcagtcaccttgtctaaaaactcctggtccagtttgtttaagttctttcgttcattttcgatgttttcttgttcactttctgtttcaggaattgaggtgatgactcctgctgttttgcgtcggttttccaaaatgttattgatacggctgtttagcaaacgggcactaaacggtttcgtgatgaaggaatcggctcctgcagcatatccctcttccttatcctgaagtgtatctttggctgtaagcaaaatgactggaatatgactggtacgcatatcttctttgatatggcggcatagctcaatcccgtccattaccggcatcatgatgtcactgatgatgatgtttggaatttggttttgtgcgatgtcccatccttctttcccatctgcagctgtcagtacttcatacatttcctcaaatgaacttcttacatattcgcgtatgtcccgattatcttctacaatcaaaatgataggttttccgtcttcggtttctattgaaattgtttgttcattattttcttctgatttatgaacttctttgacaacttgatgctctgcatttgggtatgtattttctgtaattagtttcaaagtgaatttacttcctttttccacttcactttccacttcaatggttgcttggtgcaaatctgccagggattttaccagtgccagaccaattcctgaacctgaagcctgatattttcctttgccttgataatatcgttcgaagatatggtttaaagattccttggagattccgtgtccggtatcttccacactgatggtggtatatttaactccgttttcttcattgctggctaaagtgagtgttatatcgccttttggggtatatttaacagcattcgacatgagattatcaatgatgatggtgataatctcatggtcatagtaaagcttcgtatcctgcgtatcaacttggatatgaatgtttacttctgcattctgatttagctccttgtattttatacctatttcctgtactaatagtgccaggttatgatagcctacctttaactttctgttttctgtttccgtttttctgaactccagaatctgattgataaggttgagcaatcggttggcactgtcgcggatgatactgattttattggcttgtcgtggagacaatgttttatcggctaataagtcctctaatggtccgagaattagagttaaaggagtgcgcaactcatgtgtgatattagtatagaaacgcagccgttcattattgagcttttgatcattttcgtgctggtgatgttccaggttcagacgactttccaatgctagtttgcgtttatagaagcgtaagatgccaaataatataaggataatgagtatagcataaagtaattttgcataccaggtgagccagatagggggagcgataataatttggagagaagtaaatttgttaccccatggctggtttctcattttggcttttactttaaatgtatattctccaggttctagatttcggaacgtaattcgattctcatcacctgtttcaaaccatgttttacctaatccttccatagtataagcatattccacttggggagtttgtgagaagtccattacactgaaagagatggtaaaagtactattttggtgagataattctaccttgttattggtgattgggacaatcgttcctttgctacttggattggagttatcgtaacttttaatatttgtaatttttacaggggcaatctgtacattttctataatgtgttcagggttaaagtagcaggccccattctgtgagccgaaaaacaaattaccgttgtcgtctttgcatactgcaccatccatgaagtctcctctgggtattccttggtgccaggtatagttcagaaatcttttttcatcacttttccattgggcaattcctccgtttgtactgagccaaatatttccttttttatcttctatgatacttctgacattttcatcgattagtccttgcttgtgattgtatatttcaagtttaggattgctcgtatcattgatgtggacgatgcctgcacgtgtagctacccatagtcttccttttgaatccatatacaatgagttgactgcatttgacttcattccattggaggtatcgaagtgcataattctttttccttctggagaaaatacattaagtcctttaccgaatgtacctaaccataatttcccttgacggtcccgttggataccgtgtatcataatgtctgggagttgtttgtttatttctttttcttcgattattttcccattctcccaggaatacaatccattttgggtaccaatccatattttattgttttcctcaaaaaaacagcaaatgtcagcactcttgtcctctagttcaatccgggtaattttttctgtctgtggatcacaagtcaaaattccatctttatatagtcccagccagataataccttttttatctttaaatatgacagaggcatgtgtgtgtggattagctttgccgaccagtgacaggattttttgaagtttcatgtcggggctgaatattgcgatttcattttctcctcctaaccagatacgtgatttattatcaatggcaagtccccatacttgtttgtctgttaatgcaccgtcttttagcatattataagctaatgtttgaaatacgggttggttatagctgagaaaatccactcctcctcgataattccctagccaaatattgccgaaagaatcttgtagaaaacacctagcgttcggagatgatatgccatgtaagtcattggtgacttgtatgttttgaaaatgcatattttcggggcttgtaaacacattatcatttaagtcaagtatacttactcctcccatgtgggcacatacccataatttaccatctttactttcacctatatcgttgatttgattggataaaagagagtaggggttttcctgctgattttgaaaattaatgaattgttctttatggggattgaataaagccagccctttatcagttccaatccaaatagcattggtttggctaatgaatatacagcgaaccgtattgttgggtaaactatgcgggtcttcaggattgtgttgataaacttttgccgttcttttctgtatgtctataacggctaatcctcctttatgaagtcccacatagagatgaccttttccatcatcagttgcacaccaaaagtttcctgataaacctttaatatcttttgctctataatgagtgatttcttttgttttgttgctgtagtagtctatacctaaatgataatgagtaatccagattcctccgtcggcagctggacttaaattggtaatgtctctggtaatcatgccaggcactccgtttgtaatgaaggtttgtgttttgttatcaaaaatactgattccgtcacgctgagttcctacccatactgtgttgtctgcttcattgtagtataatgcactgtgtgcattgcttccaatagcggaatttcctatattgtatattgtaaaatctttcccgtcaaatttacataacccggattctgaagccatccatatatatccttgcttgtcttgaataatatcaacaatataattactgaccataccgtcagccatagttaatcgtttaaatatatatggggattgtgaaaagcttaaaagacaccatccgaagaaaagaagaaaaataacaatatagtttctcatggtttgtggtttttatacaaaaatacaataaagtccatattcaggcttgtttgattattgaaaatatattaggaagttgaaaacagacgaattttttgtggcttgacgaattttttatcatacaaattctctcttctttgacttgatgaagaatattgagcaattaaagaatgcttaattttcttctttcgttgcttattttttatcttttcttttatatatgattacataaatttgcaaacagaaaatggaaactaaagttatagaaggtttcggtttctaaactatagaaacttgaaacatccttaaatagtctaattaaaatgtagaaaaacatgaaagtagattcgtttaaaaacaatcgaaaggctttgtttgccttactgctttgttcgggttttatagcaacccatccgttggctgtgatggcggaaagtgaaaactattctgttcagaatgtacagcagaaacaaactgtatctggtattgtgaaagactcaagtggggaacctatcattggtgccagtgtattggaaaaaggtacaaccaatggtactattactgatttggatggtaaatttacattatcggtatcttctaatgcagtgttgcagatttcttatattggctataagacattggaaacgaaagctagtcctaatatgggagtaactttgcaggaagatactgaaactttggatgaagtggttgtggtaggatacggtgtccagaaaaagtcggatgtaacaggttctgtaacttctgtacctaaagatcgtttatctaaattgccggttacaaatgtgttgcaggctattcaaggagctaccgcaggcgtaactattacacagacatcttctattcctggtgatgctccggatgcattggttcgtgggcaaaactccattaatgccaattcaggtccttatattgtggtagatggtgtgcctattagtaagtcaggtggaacattgaatgatattaatccgaatgatattgaatcaatggaaattctgaaagatgcttcagctacagctatttatggtacaaacggagcaaatggtgttattttgataacaactaaacgtggtaaatctggcaagcctaatattcgttatagtggttatgtcggttttgaagatttttcacataagttgaaattcggtgatggcgctcagattttacagagatataaagactatgttgcacaaaatccaggagaaaccctgttcaatggttttgtaaaaaatcagaatgaagtggagaactatgagaatggatatgagacagattggattgatgccgtatctcagacaggtattattcaggatcataacattagcgtaggtggtggagctgaaaatgtgcaatattatatctctgctgactatatgagtcagaaaggtattatcaaagggtttaattataagcgatattctatccgtacaaatatagatgtaaatgttactaattatttgaaggtaggaactaattcttatattgtatctcataatcgggatggaggacgtgccagcttgttgatggcagaagctatgagcccttatggaaaagtatatgaggatgatggctcatattgcatttatccgatgtattctgaaagtttatttacaaacccgttgatgtggactacaacttctccagaacgtcgtcagtggaatattaacttgaatggatatgctgatttagattttgagaaactgtgggctcctcttaaaggattgaagtataaattgaatgctgggtttgcgtatatgcctaaacggtataataattatgagggaaagtctgtaaataataatactggttctgctgaaattaagaatgaagaaactcaaagttatacgattgaaaatatcgtgacatatgcacgtgattttaataagcatcattttgatttgacaggattgtatgcagcttctcgtaaaaagtatcagtgggctcaggctaaagcaacgaatttccctagtgatgatcaaacatggcataatataggcagtgcttcaactcctacggttgcttcttatacggagttgtatacaactgtttctcagatggggcgtttgaattattcttacgatagtcgttatttgtttacagccacagttcgtcgtgatggatcttctgtttttggagataataataaatatggagtatttccgtcagtggctttgggatggaatgtaacaaacgaagagtttatgcagcctgcacaaaattggttaaacaatttgaaacttcgtctttcgtatggtaaatcaggaaatgaagctattggcgtgtattattcacgtatgaagatggtaaataatatgctggctatgggaggtagtgctaatcttgcattatatcctgatgaatttatgggaaacgcagatttgagttgggaaacaactaagacatttaatgtcggattggattttggactttggaataatcgcttgactggtaatttggatgtttatttttctcggactaccgatttgttgatgcagcgtaacctccctacggttagtggatttaataaggtatatgccaatatgggtgaaacagctaacaaaggtattgagctgacattgaattctcgtaatattgttacaaaagattttacttggagtactaatttagtattttcttggaataagaatgaaatcaaggatttgtatggtgacggaaaagatgatatcgctaaccgttggtttattggacaacctattggagtaatttatgattttactaaagttggtatctggcaagaagaggaaattgctgcaggagaacacctgaagtgggatccggtggctaaagctggagatttgaagctgttggatttaaataaagatggtaagattaccgatgatgaccgttcagtcttaggacagactactccaaaatggattggtggattgactaatacatttacatggaaggatttaactttaagtgtattcatacaaacagttcagggagtcatgaaaaataatacgttgattggtatggctggcgatgaaatgggacgtcgaaatactgcaactgagattggttattggacacctgaaaataaaagtaatgaatggcgttctttaagcaagaactcaaatcctcatggttatggtttcccttgcaaagctaattatacacgtataaaggatgtaacattaagttataacttccccgcacagctcattaaaaaaatgggaattggaggattgactgtgtatgctagcggaagaaatctgtttacttttacaaaatggattggttgggatccagagtctcgtcagatagctcgtggtagtagctcatgggatgcaactcgtggtgagactgtttatgattctagtaactatccaatgacaaagagttacgtatttggtattaatgtaaccttctaatcttaataaatatgaaattgaaaaatatattattcggcacgctggcagtgtcagttttgtcgatgggaacaatgtcttgtagtgacagttttttggatgaagaaatgtattcaaaatattctcctgaaggagctagtgtagataatcgtttggtaggattatattatacgtatgctagcttgtggggatattctggacgtcaaggctttttgagttgttttcaaattggtaccgatgttgcgtctgctggtgatgtggaaggagtagaaacgccattttatcaatatgcacaattaacagatgaaaatgcaggagtgtcatggttgtgggagaaatgttatgaatttattaatgaagcaaatcaaataattgagatgctgggggaaaacggtgataaggcaaagattgcagaagcaaagtttttccgggcatatgcttataatacattagtgactctttggggagacgtgcctttggttacagaaacaacaaatataccaaagactgattatacgcgtgaaaaagttgctaaagtagatgagttaatagatagtgatttgcagtatgcgatgactaatttacctgatatgggtaaagctgtgacagaaagtcgtgctaataaagatttcgctcgtcagttagctggagaggcctatttgcgtatgggtatgagagatgcttctttctttgaaaaagcggaaaaatcgttggacccaattattgctaatgcatcctatcgcttgatcgaagcacgatatggtaagtatttaagtgaggcaggagattattatcatgatatgttccgttggcataatcaacgccgttcagaaggcaatacagaagcaatttggacttttgaaatggaatataatagaaatgtaactggaggtacaattgataacccacagcatcgtcgtgtttggactcctgctttccataagtatgcaggaatgcagaatgccgattctattggtggtcgtggaaatggccgtttgcgtttaagtaacttcatgaagtatgggttatatgaaaaaggagatattcgtaactctaactttaatattcgtcgcgtgttatggtataataggccgggttatgaagaaactttgtatttagatgcgaatggttatagtatcccgaaagaaatagaagttgatggtcagaaaattagtaatcctgatatagtatcaactaaggttgttcgtacaggtgatcaagttattcctggtccaagtgactctttaaatgtttacttcccgcatacaactaaatggggctgttatgatgaaacggatgattttggttatgcaggagtaaaagattggcctgtaatgcgcttgggagagacttatttgttacgagcagaagcacgtttccgtcaaggaaatttaactggtgctgcggatgatattaataaattgcgtgatcgtgcattcaaggaatatcgtgcaagttcaggcaatcctaatgctggtaaagtttctgaaaaccaaattgatattgactttattctggatgaacgtgctcgtgaattgattggtgaagagaatagacgtatgactttggttcgtacaaataccttgaaagaacgtatagctaaaaatggagatgtggttcctgctgctccagagtcaaaagttattacgggatttaaagattttaatgtattgcttcctattccattgagtgtaattcagttgaataaggatgcgaagattgagcagaatacgggatattgataatgactataatatttcgataagaccgtgaaataaaaaagttgaagtttctcttttttctcaggatggaaggggaacttcgactttttcattctaaacagattccataaaaacaacaatcggaagggctatcctaaattttaaatgactctctgatttttctgtttttaatggaatatagagtcggagaaattttttatattacctttacttttcggaaagattcttgtgagaaagaagaaaaataaaatcaagaaagtaatctgaaatttaatcaaatgagaatacatgtttttataataggaattgctctgatgagcttatcatgttttggccttggtgcaaccgaaacttcagagacggtttttgtgttgaaaaataagaatatgagcttgagtccttatacgggtatgacacgggagcattggaaagaggccgctctttatttgttggaaggggcattcagttatgtgaagtcaccggaagatcctttggattttccaaaacagccgggaaaaagttatcctcggacgccttctcaagaacctgtggcccgtcttgaggctttatgccggacgatgtttcttgcggggcctttattgaaggaagatccggaattgagggtgaacggaatactgttgggggattattatcgccgacagttggaattgatgcttcagcccggcactcctgtctatgtaccgatgaatcctcctaaaaagaatggtggacagcggcttgtggaattgggtggactagctttgtcgtttatgatggctccggagatattctggaatcccttgtctcaggaggtgaaagatagtctggctgtgcgtatgctgagttatggtgaaggcggcacgtatgagtgtaactggcgtttttttaatgtcaatattatgagcttttttctgagccaggggtatcatacggacaaggcttatttggaagaactgttgcagatattgttggctgcttatcgtggtgacgggtggtatcacgataatccgttgtttgattattatagtatgtgggcttttcaaatgtatggttctttgtggtctgaaaagttcggaaaaaaatattatcctgattatgcccggcagtttatggagcatttccgtgaaattcctgaaaactatccttacatgtttgcaagggacgggaagatgattatgtgggggagaagcattacttatcggatgggggcgtctgttccacttgctttgacgggtttgttggaagatcctgatatcaattacggctggatgagacgtattgcatcctccacgattctgcaatttttgcagcatcctgattttttggaggatcgtatacctacactgggtttctatggggcttttgagccggctatacaaggctatagttgccgtggaagtgtgttctggatgggaaaactgtttttggcactttaccttcctgctaataatcctttttggaatgcagtggaaaatgaaggtgcttggacggattttgagaaagatagggtatattgcaaatatgcggaggatgctcatatattggtcactgattatccgaatattggtgcatcagaacttcgtagcacgacttctcatagttcatcgaattaccattgtgtagaaaactataaccgcttgtcttataacagcgaattcccgtggcaagcagatggaaagaacggagaagtggcgatgagttacgtggtgaagaataaagagggaaagtgggagcctctccgtaattatagttttaagaaatatgaggacggtttctattgtcgggaggcttggctggagagtgatgaggctgtttatttccagttggcagaacttcctcttcccgatggaattttaaggattgacaaagtgtcgtctccttctccagtagaagtgaggatgggacattatgctttaccggaaaaacagggaaaaatccgtgaaagtgttattcgattggatggaaaggagacttatgtaattgataacggtgtttatcgtttgggtatgacgacttgggaaggttggaagcagatggagtttgtccatgcggaagggctgcatccggatagtcggaacagtgtggtgattgacgcaagtgacagatgtgagggagagaaagtctatattacgctacagttatggagtaaaagtggctcaaaagatgatgatgtttggaatccggttagcaagatttgctttgacaaaagtagaaagcagtttgaagtggtattgaaagacggtaacgtgaagcgtttgaaatggtagaattgtgagacggctttaagtctgtatctaatattattggtcatcaggatttctcagtgttataggcaatgggaaattctgatgaccataaatgtattctaaggggctgttcttcttgtaaggtaagcatggtaagaacttttttgcatagccagttggtattaagggctgaattttacttcattttttacgtttcccttctctgaaccgtatgttttccgtagcgaaaacctatgtttcccagcaagaaactgtacgtttcccggcagggaaacatagaaaccctttttgcttcatacactattcacaaggacgttttacgatggaggaagacgactgatgagaaagctgatttagaagttgaggcaggaaaaaaataaaaaagcattgcttggagcttaagactcacaggcaatgcctttctttatatcaataccgataaactatttatccgatattcttcactttaatcaggtattcagcaatctgaacggcattcagagcggcacctttcttaatctggtcgcctacaatccagaaagtcagaccgttttcgttagccaggtctttacggatacgacctacatatacagggtcttttccagccaggaacaacggcatcggatattctttcttttccgggttgtccatcagtaccagaccttcgccgttggcaaatgcttcgcgggcttcttctacagataccggacgttctgtttcaatccagatgctttctgagtgtgaacgaagtgcaggaacacgtacgcaagtagcactaacctgtacatctgagtgcatgattttacgtgtttcattgtacatcttcatttcttctttggtataaccgttgtctgtgaacacgtcaatctgaggaatcaggttgaatgccagctgataagcgaatttctctacagtgacaggttctccggccaatacctgacgatactgttcgtaaagctcgtccatagcagctgcaccggcaccactggcagcctggtaagtagatacgtgtacacgtttgatatgagtcaggttttcgatagctttcagggctacaaccatctggatagtcgtacagttaggattggcaatgatgccacgcggacggttcagcgcgtcttctgtgttgacttcaggcactaccagaggaatatcgttttccatacggaaagcgctggagttgtcaatcatcactgcaccgtatttagtgatggtttctgcaaactccttagaagttcctgcaccggctgacgtaaaggcgatgtctactcctttgaaatcatcgttgtgctgcagaagttttacttcgatttcttttccgcgaaaagtgtattttcgtccggcacttcttgaagatccgaacaacaacagttcatctaccgggaagtttctttcatcgagcacacgcaggaactcctgtcctacggctccgcttgcaccaacaattgctactttcatttcttatgtttcttgtttaagttaataaattccgtgattgtattgctttctgtattttagttagatagttttttcttctacttgtatcctttgaaccgcaaatttaaaacattttggaataccaaaggggaaatacggaacttttttcgtatttttgtccataaatttaaaccgaacagcccctcatatatgaaagatttgttagatttggttcatctcaatatagattttcccatcactgatcctacgtggatcttttttttggtgctggtaattatcttgtttgccccaattgttttggaacgtctgcgcattccgcacatcatcggaatgattttgccggtatcgttatcggggaacatggattcaatattctggcgcgcgacagcagctttgagcttttcggtaaggtggggctgtattatatcatgttcctggccggactggaaatgaacatggaagatttcaagagtatccgtgtgaaggctacggtattgggcttgctggcctttatcttcccgctgggtattggtgtgtggaccaacctgaacttgctggggtacggactgattacttctgtgctgctggccagtatgtatgcctcgcacactttgatagcctatccgattgtgattcgttacggtatcaaccggcagcgggctgtcagcattgcggtaggaggtacggcggtgacggatacgctgaccttgctggttctggccgttattgcgggtatgtacaagggtgatacttcggatatgttctgggtgtggctggtgctgaaagtcgtggtactgagcgtggtgattatgctgaccttccctcgcatcggacgctggttcttccgtcgttacagtgaccaggtggtgcagtatatctttgtgatggccatggtcttcttgggagccggattgatggagctgattggtatggagggaatcttgggagccttcttggccgggttggtgctgaaccgcctgattccgcatgtttctccgctgatgagtcacctggagtttgtaggaaatgcgctgtttattccttatttccttatcggagtgggaatgctgattaatgtgaatgtgttgttcggccatctcgattccattaaggtagctggtgtcatgattgtggtggcactgttaggcaaatggattgcatcgtggctgacacagaaaatatatcgcatgaaggcggtagaacgggaactgatgttcggattgagtaacgcacaggctgcggctaccctggcagcggtactggtgggttacaacattattctgcctagtggagagcgcttgttgaacgaagatgtactgaatggtaccattctgctgattctggtgacgtgtgtggtcagctcgtttattacggaacatgcggccaaacgaattgcgatggatgatgcggaagtggaagaagaacaagaacagaaaaaagagcgtattctgattcctgttgccaatccggacacactggataaactgatgcagctggcgctggtggtacgtgatgaaaagcggacggacaatctggtggcactgaatgtgattaatgataacaatgattctgtccggttggagatgcggggaaagagaagcctggaaagggcggctcagattgctgcatcggccaatgtctttctgaaaacagtgtcgcgcttcgacttgaacattgctacgggtattttgcatacagccaaggaaactgaagcgactacgattgtcattggtttgcataacaaggccaatatcgtggattcgttctttggtaatttgacggaagatttgctgaaaaatacttatcaacaggtgatgattgcccgctttctgatgccggtcaatacgttgcggcgcattatcgtggcggtacctcctaaatcggaatttgagcacggctttgtgaaatggattacgcacttgtgccgcatgagcagtcagctgggatgccgtctgcatttctttgcccatccccagactttggggtatatcaagggatatatccagaagaagcacaaggatgtgatgacggaataccaggaactggataactgggatgacttgctgattattacaggacaggtgaattacgatcatctgctggtcattgtcagctcacgaagagggtctatttcgtacgattcttcttttgaacgcttgcccatgcaggtatccagatattttaataacaacagtatcatgctgctgtatcctgaccagaagggtgacccgaatgaggcgttaagctttgccgatccgcgtggatgggccgaaacgcagtattatgacaaggtgggcaactggttttataaatggtttaagaaagattcatgagcgaagaaaataagaaagaatggcagcagcgcacggaattgctgttaggtgaagagaagatggagcgtctgcgtaaggcgcacgtgctggtggtaggcctgggaggagtaggtgcgtatgcggctgaaatgatttgccgtgccggagtgggaaggatgacgattgtagatgccgatacggtacaaccgagtaacatcaaccgtcagttgccggccactcattccgttatcggacgtccaaaggcagaggtactggctgaacgtttccgggatattaatccggaactggagctgaccgtgttgccgatttacctgaaagatgaggctatacctgaactgctggacagtgcggcgtttgattttgtggtagatgccattgatacggtagctcctaagtgttatttgatttatcatgccttgcaacagggattgaagattgtcagcagcatgggagccggagccaaacgggatatcacgcagattcgttttgcggatttgtgggatacgtatcattgtgggttgagcaaggcggtgcgtaagcgtttgcagaaaatgggtatgaagcggaaactgccggtggtattcagcacggagcaggccgatgcaaatgccgtgatattggtagatgatgagcagaacaagaagtctaccgcaggaaccgtcagctatatgccggccgtattcggatgctatctggcggagtatgtaattcgtaaattgtaaagtcgtatgattcagttggaagggataaccaaaagttttggtgcacttcaggtgttgaaggggattgaccttgaaatcgggaaaggtgaagtggtcagtattgtggggcccagtggggcgggaaagactaccttgctgcaaattatgggtacactcgacaagccggacggaggacgaattatattgaacggcacggaggtgaaccgtctgaaagaaaaagagctttctgccttccggaaccgggaaatcggttttgtttttcagtttcaccagctgttgccagagtttacggcggtagagaatgtcatgatgccgtctttgattcaaggcaagtcggcgggaactgcccgaaaggaagcattggatttattggatttcctgggattgtcggagcgggccacacataagccggcagaactttcgggtggcgaaaagcagcgtgtggctgtagcccgtgccttgatgaatcatccttcggtaatcttggcggacgagccttccggaagtctggatacgcagaacaagggagaattgcatcggttgttctttgaactgcgtgacaagttaggtcagacttttgtcatcgttacgcacgatgaggagctggccacgcagaccgaccgtaccatccatctggtagacggacgtatcgtataagataaaaaaatcccgtcccggtatgtgtaccggtggacgggataaatttttcctcgatttattagtcttttagaaagaaaggtgtacgatttccgggttgtggtcggaaaggaatttctttgcttcccggttttcttcaggaatgtagctgcgctgtacctctatttgaggagtaacaaatatgaagtcaattttctcacatgagtcggcaggaatgcgtccgaagtcatggaaggtatagctggcaccttcttgctggagagctgtcttatgcgcatccttcagcacgaaactgttgccggtgatggtctggtaggcttccgactggtcggatacattgaagtctccggtaactacggcaggctggtcgcctacaatttcttttattttctcaataatcagcaaagcgccttttttacgggcttctgttcccacatggtcaaagtgcgtattgatggccataaagatttttccgttggtcttgtctttcagcttggcccaggtggcaatacgggtacaggcaccgtcccatccgatgaatcctacactgtcggggtattgtgacagccagaaggtgttgttgtccagtaattcaaaacggtcttttttatagaacagaggggcatattcgccttgtgtctttccgtcttcccgtcccacgccgacttcggcatattctggcagacgggctttcaggtcttcaagttggtggtgcaggacttcctgcatgcctacaatgtccagattttgtgccttgatgaaattggctacggtgtcttttctgtatgtccagctgttcagactgtcgtagggattgtcgtagcggatgttgaaggtgctccatgtgatttcactggttggttggggagattggcatgaagcgatggtcatgcacaaagagagtcccagaaaacttcctaaaatagtgtagagtttcatagatataaagtttaatgatgtatgtttttcctataaaacaagtcacggcggtttaccacttactttgcggtgtaaaaataaaaatatttttagtttttctttatagggaaggcagtgcgagtatatgagttttttatgctatctttggcggaaataaagagttgttatgagtcatataaaattaggaaaatataatcagctggaagtagtgaaggaagtggacttcggcgtgtacctcaatggagatgaggacggtgaaatcttgcttccgaaacgttatgtgcccgaaggtaccaagccgggagacatcctgaatgtatttatctacctcgatatggaggaacgtctggtcgctactacgctgcagccttatgtacaggtgggtgaatttgcttgtctgcaggtggcatgggtcaatcagttcggtgcctttcttgactggggactgatgaaagacttgttcgtgcctttccgtgagcagaaaatgaagatgcagaaaggaaaacgctatgtggtgcatgtgcatctggatgaagaaagctatcgcattgtggcttctgccaaggtggagcattatctttctacggagaagccagagtatcagccgggacaggaggtaaatgtcatggtatggcagcgtacggatttaggctacaaggtgattgtagaaaatcagtttagcggtatgctgttccataacgaagtgttccagcctttggaagcaggaatgcacctgagtgctttcgtgaaacaggtacgtccggatggcaagattgatttggaattgcagaaagccggtgcccggaaggtggacgatttttccgaagtattgcttcagtacatcaaggataatgacggctttactccactgaatgataagaccgatgcggaggtgatttaccagaccttcggtgtaagtaagaagactttcaagaaagcggtcggcgatttatataagaaaagactagtggtgctggaagaagggggtatccgcttagtctgagacttttttgatataaaaggaagtgctgaacctggaagagatgattcctgattcagcacttttttatttataatcgtttggagagagatttacgttctttttcttttatgttgcttttttcccggatttgtttcgggcgcatcttgtcgggacttacttccggacgtcgggttggcctttcctggggcttgaagcctgggttcttgtgaggattctgagggggacgtgcctgcggtttgtggtctgaatgctgaggcgggcgataattcggttttcccactgaaacaggtctccggtccggacgaggtgcaggcttccagttgggcttctgcggaggacgattgcccggacgtggtccggcaaagtcgtgcggtcgcatctgcggactgattcggcacggacggctgtacactggatggtggtagcgtgcaggatagttacgccggtagtagctaactcccccgaaatgtgaccggcaatgtccgcccctgtaggtcaggtaatgacggggaggtccgaagtagaaatgggttctgttcggataaattttatacacacgcagatagcatacgttattgatggcataaatgggacggaagaaatattcaatatcgatgaagcgtacgtattcggcttgtgaaagtacccatcgcaggtcgtcgtttcgttcgtccaggtagcggtaatatgcatccatcgcacgagtgtcggcaacggcaatgccagaaacgtatggacctatattgcagagaaagtcgtaattgatttcgtacaggtcgttgtactggttactgttgaggtgcagttcaaaggccattcggtcggtcaggaaacgggcattgacccggaagtcgcccagaccggatgcgtagccccggattgtgctcaggcaaagggccagcaggcaaagaataaatgttcttgttctcataagcattgtcttttccggctgagagtgtgattcctccagctttgttgatagcacaaagttagcggaagaaaattctccggtcaagatgaaaacgcccattcttttgtaggggatttcctataattggatagggaaataccggctaacggatgattttgagaaatttctcgatgtctctccgtatcatctggtacaggggggagttcttgtagaaactgtttcggtggataacgacttccacgcctacctgacttcgctggtagctggtcagctcgttgtgaagctgcatgtcgtggagggccaggtcatggatttgctgttctctttctcggcggagtacggtgcatacgggaatgagcagtcgcaacactacattgtccataatgtgatggccttgaataaacatataggtattgtctggatggactcccagacggtcgaattcttttttcatgctttcaatttcttccagcgcttccggatgatggcgttccaggtcatgcagtttgcggttgacttttttggccatggtttccagacttcgttccggatggtgggtactaacctgatcaagctttacataggaacagaagtccagcagggagaattctgacagaatatgtttccggtaaaaccagacagaccacacaaacagcggataagctatctgagaataaagtttcatgaattccgggaaattaatcagcttatggtcgttcagcgtagccatgacacagatttcatgcaacccttcggcatagcaatggtagttctcaatggcgtatgcataggtttgcatcacgtagggattttcgatgatgtatcgggaggtgttggtacgtccttgcaacaggtagtcataatcgctgtccacgcaggcaatcatattttcgcctaattgcttcccgagctggttcatcagtacggttttcttacctttagccaatgaagtctgagaggggagcatgacttcgaaatagcgggtattgtcttcgtattccgcaagtatggatctccagaaagaaatatcatcatagctttctacgtaggccacgatttttcttcttgcacgcttgggcttaaggctgttagccgctccaatgtacagggaagaaaggttttcagtcagtctttttcccatacggctacatgtttttaaagggttgtaatgtcactcacttcggtaacggcgtccatccatccgttcatgataagtgccggagaatgggtagtcagtataatttgcacattcggattcaggcttcggatgagcgagataagccgttgctgccattctacatggagtgagatttcgggttcgtccataaagagggtacatggttggttgtcctgcaccagtacggtgagcaggatgactagcatctgcttttcaccggaagaaagctgataaggggttaatatgtcgccgtcttgttcaaactgtatttcattactttggcggagaatcttttttcccgtttcactgaacaggtcgtctaccaggttctggaaatgggttttaggcagagagatttcggctgccttggattgattttcgggcttgccgctggtcaaaagctcgataatccggttgccgatgtttacttgataatccagatagcgtcgctgcaggagataaagctgccagtcgagttcagtcttgacattctggttaccgattttttccaataatccggaactgagcagcggacggtcaaaacttcttatcacatcgaagtggatataggtggcatcttccggatagaaagtgaaagacactcccaaatgaatgccattactcagggctcctccttccaggtcactcagccggcggacagagttgttcagaatcgtactttttccgatgccgtttactccactcaggatgtttacatctgggcgtaaatcccaggcaatgtttttccggccccataagccctttatctcaatgcgcttgatatattcagcttgctttttcatggactgtattttttaacgcgtcaaacaaaaatagaaaattcccgggaataaatcaacgcccgaccggcccttttttcaaaatcctcgtaactttgcagaaatttaaaaagacgaaatcatgaaaggttctgtaaaagctcatatttcattgttactggctgcaagcatgtggggattgatgtcgccggtaggcaaggcagccatggaagcgggtattaccggactcacactggcgaatatgcgtatgataggagcggccgtgtgtttctggactacctctttctttgtaaagcaggagaaggtcaatccgcacgatttgctgatgctgttctttgcttctttgttagggattgtctgcaatcagggatgttttactttcggcttgtcactgacctctccggtcgatgcgtctatcatgactactaccatgccgattgtaaccatgattttagcggctcttttcctgaaagaacccgtcactccgaaaaaggtgattgggatatttcttgggtccatcggtgctctgaccttgattctgagcaaccgagggggagatacggaaggtggcagcgtatggggggatgcactttgtatggcagctcagattagttttgcctgctatctgaccatttttaagaagttgattgcgcattatcacgtgattacgttgatgaagtggatgtttacttatgcggcgatatgctttatacctttctcttatcgtgacttttcagtgatggactgggcatctttcccggtagaggtctggctggaagtcggttatgtcatactctttggtacgtatgtggcttatattttgatgctggtcggtcagaagtccttgcgtcctacggtagtcagtatgtataactacatgcagccggttgtaggaagttgtgtagccgtacttgccggtatggcaactttcggttgggtgaagattgtagcggcgttgttgatttttacaggtgtctatgtggtgacgcagagcaagtcgcgtgcccagatgctggcagaaaccaattcaaatgtagaaggaaatgaataaggaaggtactcaaataaaatcgcctgttttatacttgcagcatcactatgaattgctgaaattagagtatgaatacgaaaaggagcagttccagcagcagacggagctgatgggaattggtcggaaaatcaaacggggcatgtgctggtatccgttatcgttaggccggagctattacaatgccttgaatcagttggtcattgaggtagaacgaaaagaagacaaagagatagagcatctgtttgaatatgggaaaccggtttgtttctttacgcaggatatgtcggggaaactgacttacctgaatttcgtagctacggtgaattacgtggaggaagaccgcatggtagtcatcttgccggatgccaatgcactgcttacgctgcagagtaaagaagtggtcggggtacaactctattttgatgaaaccagctatcgcctgatgttcgaggcactgaagcaggtcatttctgccaagaacaaccgactggcagagttaagggatatttttcatggtacgcagcctgtatctactttttcgtttcaacccgtacgtttcccctggttgaacgccacacaggatgaagcggtgaataaagtattgcatgccaaggatgtggccattgtgcacggccctccgggaacaggtaagaccactacgctggtggaggctatttatgaaacacttcatcgtgaaaatcaggtactggtatgtgctcagagtaacatggctgtcgactggattagtgaaaagttggtagaccgtggtgtcagcgtgcttcgtatcgggaatcccagtcgggtaaacgataagatgctgtcgtttacgtacgaacgtcgttttgagtcgcatcccgactatccccagctatggagtatccgtaaggcgattcgtgaactgtatacccgtagccggaaaggaaatgaccgggaaagtatccggcaaaaaatcaattcactgaaagaccgcgccacggaactggaaatccgtatcaatgaatccttattcagtgaagcgagggtgattgcctgcacgctggtgggtagtgccaaccgcttgctcaccggacagaagttcggaacggtatttatcgatgaggcggctcaggcattggaagcagcctgctggattccgcttcgtaaagccgaccgggcgattttggctggcgaccattgtcagttgccgcctacggtaaagaatccggaagccttgcgtgcggggttagggcatacattgatgcaggccatcgtgaaaaacaagccggaggtggtatccttgctgaaggtacagtatcgtatgaacgacgaaattatgcgtttctcgtctgactggttttatggaggaatgttgcagtcagctcctgaggtgaaataccgtagcattctggattttgacacgccgatagagtgggtaaatacggaaggcatggactgcaacgaggagtttgtaggtgaaaactacggacgaatcaataaaccggaagctgaattgtccatcggtcagttaaaggagtacatcacgaaaatcggtcgggaacgctttttagaagaacggattgatgtgggattgatttctccttataaggctcaggtgcagtatttgcgtcagctggtaaagaaagatgcgtttttcaagccttatcgctccttgataactatcaatacggtggacggctttcaggggcaggagcgtgatgtgattcttatcagtctggtacgtgccaatgaagacggtcagattggtttcctcaatgacttgcgccgcatgaacgtagccatcacccgtgcccgtatgaaactgattattctgggcgatgcttccacattgaccaagcatgcgttttataagaagctttacgagtatataagtgagctatagggaaatagtcatgaaataaaagatacctgaattacttcgttttatgcactatttagggacgatgtagattgtatgttatacacttattgttatatttgcagcagataagttagctatagaagtgatttaaacttatgtatatcaattaaaatgttgtcaaacagcgtacaaatagaattattcattatattatgggtgacca

SEQ ID NO: 3766 - DNA, 119075 bp, Unknown
  gut microbiota DNA sequence
tggtttccataacttttgctgattttctttccggcaaagatataaatttatcggatttacccctcagattattacgttgacccaatttctttattctttctccagtaatatatccagccatatatatcggctaatgcccatccgatagggattgaccaccagatgccgtgtacaccaatggaagggatggcggccagtgcataggctaatactactcgggttcctaaagagagaatcgttaaaataatggacatttctggtttgcagacggctctgtagaatccgtaccataaaaataaatatccaataccgaggtaaaaactgccttctatccgcaagtattcagtacctatacggataatttccgtttcttctggagaaatgaagatttgcatcagttgtggtgcaaacaggaagatggccagtgagagaagcaggcagaagagagtggttattccaaatgcactttttatacctttcagaatgcgggcatttttgccggctccgtagttttgtgcagtgaaagtagagaaggcgttcccgaaatcttgtacaggcatataggcgaacgaatcaatctttacggcagctgtaaaagcggccatgacggctgtaccgaagctgttgaccagaccttgaaccatgaggattccaaaattcatgacagattgctgtacgcaagtcagtgaggcgtatgagaagacttgtttcatgagctgcctgctgaccttgaaatcctttctggagagtctggtttctggaacctttttccagcaatagaagcataagccaatggccgaaactgcttgggaaatgatggtcgcagccgcagctccttctattccgtaatgaagttttacaataaaccatatatccagcataatgtttaataccacggaaatggctaaataaataagaggagtcagtgaattacccaatgcacgtaagagatacgcgtagtaattataaagataaacaaaccagattcccataaaaatgattttcaggtagtcgtaggtcatatcctgcaactcctgtggagtttgcatgagggtgataatatcttgtatatagtagcaggagaaggcgaatataatcagtgtggaacttcctgtaatcagcagggaagcagcttgtgtacgtcgcaggctttcgtaatcttttgctccgtaacgcatggagaacaatgcgctgcatcccatgcataatccgatgaagatggaggtgataaagaccatgagtgtgtatgaagaacccacagcagctaaggcttttgcgcccaatgtctttccgatgatgaatgtatcggcaatattgtatccttgctggagcaagtttcctaaaataagtggataggcaaggttgagcatgctttgtgtgatacttcctgaagtaaggtcctgcgtgcgactggtctgcataatttaagcatacaatttaaaagtgtgtttgtgttggcacctaaatagttattcttcaaaataatccgtatcgatttttttaagttcatatagtaccttagtagaaactcctaaattataggttatcattaaatctgctaattttttaccgtcaattttggctatttttacgttagatggattatattctaaagcctcacgagtaaaagaagaggtggttataaaaactccttttcttccactttgaccagctaatgctccaacaaaactttggagttctcttctgccaacattattgccaatttgccatctttttgcttgaatgtgaataacatctaatcccaatttatcttcgtcaatgattccgtcaattccaccgtctccagttcttccagtgattttaccagctccatatcccatttttacaagtaaatctacaaccagtctttcaaaaaattgaggggattgttgaagtactttctctaatatttcttcagataaatttgattggagttgtttatatgtcgaatcaaggatttcttcaggagtttgttctgtgaatgatggctgtaagctttttatattgttattatcattatttccttttgtggaaccttgtttcataaactcaagaaattgatcataacgatataaaatatcattattaataatcgtaggatgttctgctagtaaattaactccttcttgggtaatttgatacttaccacgagagataactttaactagtccagctttctctagataaaatcttgcccaagataccctattagaaataattgtttgtttaccactcggtaataattctgatttttcttcttcagttagctctaatgtaactgataatttttctacgcactctttagatgtgtgaacttgattatcgctaagtaactgcagaagaggcagcatacattcttgatagttgggtatcattgtgttattttattgttgttttaatttaatttcagcttctaataatagaacttttcttgttcttttttgattattctattattaggtgtattgaatatttttatggaaggctttattcaatgttttagtacaaaattaatttgtttgttataaatatcaaacagataacatcatgttttacctttctgaaaatagtattttgagcaggtttttaataaatgaattgttgaaaaaaatagaggaattagccttaaactttaaattaaatggctaattcctctattttgtgcgcctgataggactcgaacctacacgtctcacgacaccagatcctaagtctggcgcggctaccaattacgccacaggcgcatgcagaaatatgtatttctgttttgcgagggcaaagataggaagaattttcatattctccaaatactgcaccttaattctttaactttttgatggcggtttcgatgatagtatcttttccttgctgcatgtcttcgctggtcatatctacttttacatccggttcgataccgaattccagctggttcatgtcggggtcgaacatcgggctggcagagaaacggatagaccatccgttgggaatttctgagctgaaggggagacctgagcctcctccggtggtatctcccatagtcgttacattggggaattgacgcatggtgttcacaaagtcgtttgtggcactgtaagaacggcgattggttaataccactgccttcttctgccagcggatactgttggacggttcctgatatacaggttcagggtccgagaaatcattatggcctggacctgttttatgacggatgtagccgaccagtactttctcatttgtaaaccgtgcggccagtttctgtgctgtagtcaggttgcctcctccgttattgcgtacatcgataatcagtccgtcgcaaatctccagtttcttcagcatctggtccaggtttccgtcgccgataccgtcggagaaactttcacaatagatgtaaccgatgttattttccagaatctggtaggtcagtccggaggtaatgatgtaatcctttttcaggtagttgctctggatgctgtcgctgaaattccgtggataagcatcgaaccattcccggtattgcgatgtacccagtgaactgctcaggttgacgtgtccgtctcttaattcattgatcatttccgacaagacttcgaaaagtgactcccagctcatggaggaagaaatacgtttggcatagcgggcatgcacttcatcccagtccagtccatacgtctcgtgcttatagtccaaaaagcaatattgctcatcgatgattttccagagcgattcaaagttggcttccggagaattgccctgaatgtcttcccgtatgcaggaagagaacatgcagcagaacagtgtcagcagaaggctatataagtagcaatgataaatccgtttcatatcaataaggcgtaacgtttgaaggcatggaaatacggttcttccctttcagcaggtagaagtttttcacgatgccaatcatgaaatcgtgtgaataagtatggtatttcaggtggttgactttcgcttgctggaggtcgcagatgtatcctacgcgcatggtgacttttcggatagggaaatcaagtgtcagcatctgtcggagcgacgggttgttatgaagcgaagtgaacagcacgttctttcctttgtgtcccaaggaaaacatttcgtagtatgactgtccgaattccggagagaacatggctcccaacagcggaagattggcctgatagcgtgctaccagcggatagtttccgatacggaacttgtagatggccattccggatatacctacacttccgtatgcctttgcctgtgccgggttgttggaattgcgtgtgttgtacacgaatcccccgttcaggtcaatcatcgggcctaccagcagtttcagttgttcgttcaggcgaaactgatagtgcagtgcataggtccagtttacaagtccggcatacatattggcggtctggcttggattatgtgtatacgatacattggcctgcaacagattctgggccgaaacgtttccgttcattaaccgggtcatacgcatgttttcgcgcaggatacgaatctccggtcctttgtattccaagggggaaaggtatgtatcgagcacgttgctcattcccgctccatagagtacggagcgcattacgtaacgtgtggcacgcaggctgtcttcttgtgcgtgaagcgaaaaagcagcccagcatgcgcaaagtataaggtaaattcgtagtttcatacggctttaaaagagtttcatttgtccgtcgtcttcctggctttcatcttcctccatgccgtcttcttccttttctggctcttccggctccgattccggcatgcgggttggttccagttccgtaatttggccgacggtataagttgtcagtcgcttaccctttgccttgaagctcttcacgcctacaaagtcacttgcctccaggataagtgcctcgcggaagctgtcgtgtccgccaaagtccacctggatacgcgggtatacctgacaggtcagcaggataagttgcgtatgcttgttgtctcccaggaaattctgctttttggttgtcgcttcgaaggtgaagcgtttcaggtacggataattctgctggtcggcatcatagagcacagctgtccataccttgtcaggattgaacttctcgatgcagagaatttccggatcgtaatggttgctcaaatcgaagttggtagtatagaattctccgttcttgtgtaccactaagatgctgtcctcgctttggaattctcccaggtattgtcctcttccatcgtaattgagtcggagcacatcgtggtcgaaccacacctttctgcctccgagcgtagagccgcctcgctgtttcaaagaaatcttgtgtacctcagctttggtcagcaagttacccatggattgtttccccttgatgttgatggtactgaaatctctttcaaacgtaggcttcttgatgcggggcgtaggacgcagcactacacggatgacttcagcctctccattcggattggcggtgaagtacacgattttagaacccggagtaccttgcgttacgtcgtattccctgtcacgaatgatggaagtgacattgaaacgtttgatataataataaccttcctttccgtcacggtagatgacgttatagatggtacgcttgtcgtttttcttgaatacgttgacgtacaagatgttctttccgacgaacaatttgtcggacacgcgaacaatcttgtatttaccgtctttgtagaagatgattacatcgtcgatgtcggaacagttgcatacatattcgtctttcttcagtccggtaccgatgaaaccttcttcacggttgatatacagtttttcgttggcttcggccaccttggtagctacgatagtatcgaagttgcgtatttccgtgcggcgcgggaagttcttaccatacttctctttcaggcgttgataccaatcgatggtatattccgtgatgtgcgccaggtgattgtctatctcttccagttccgctttcaggcgtgcgatgaactcatccgccttgtctttgttgaacttcaggatacgcgccatcttgatttccatcaggcggagaatgtcttccttggtcacttcgcgtacgaactgcggatagtaaggcgtcaggcgttcgtcgatgtgctcgcaagccgcatccatggagtcagcccgttcgaactgcttgtctttatagataccttcctcgatgaagattttttccagcgaagcaaagtgcaaggtttccagtgtttcgtcccgttgtatctccagttccttgcgtaacagtgccagcgtattgtcgaccgacttcttcagcaccttgctcactgaaaggaaatgaggcttcttgttgtcgatgacgcagcagttgggtgagatgttcacctcgcagtctgtaaaggcatacaaggcatccagtgtcttgtcggacgatacaccaggagtaaggtgtactaagatttctacctttccggccgtgttgtcgtccacctttcttaccttgatttttcccttctcgatggctttcaggatggagtcaatcaacgaagacgtagtctttccgtaggggatttcactgatacaaagtgtcttgttgtcaatcttggagattttggcacgtacgcgtactacgccccctcgctcgccgtcgttgtagcgtgacacatcaatcgaaccacccgtctgaaaatccggataaagctggaactcttctccgtgcaggtaggcgatggctgcatcgcacagttcattgaagttatgtggaagaatcttggaggaaagtcccacggcaataccttctaccccctgggccagcagcagcgggaatttgaccggcagtgtgaccggctctcggtttctgccgtcataggaagcctgccattcagtcgttttcgggttgaacaccacatccagcgcaaacttggaaagccgggcttcgatgtaacggggagcagctgcactgtcgcccgtcaggatgttaccccagtttccctggcagtcaatgagtaagtccttttgtcccaattgtacaagggcatccccgatagaagcatctccgtgagggtggaactgcatggtgtgtcccacaatgttggccaccttgttgtagcgtccgtcgtccagccgtttcatggagtggagaatacgtcgctgcaccggtttcaatccgtcgttgatatggggtacggcacgttccaggataacgtacgaagcatagtccagaaaccagttctggtacatgccactcaactggtgctttactgcctcgtcagtggtcgataccggtttgtagtcagagtgttcttctttctcgggcaagtttgccatttccttttcgtccttgtcaaaagtatcttcgctcatattaaaatggttcctatgtaaagagattcgggcaaagttactgaataattctgtgtggcggaaataattgacttacaattcttacctatgaaaagggcatttttgaagaaatttcttggtgtaaatacctcgacacgtacgtgacgagatgttgacacgaaggtgacgagaccttgacacgaacgtgatgagggcttcgcacgtacgtgtcgaggtaagatggcaagcacgtttgggcttattgctgcttgcggtagctgcgtatggcccatgcatagagcagaagggcaaaggacgaaagtacggaaagctggaaaccgatgtcacagatgccgcttcccttcaggtagaccatgcgcatgatttccataaagtagcgcaacggattgaagtaggtgatgccttgtgcccactccggcatgctgctgatgggggtaaacagtccgctcatcaggatgaaaatcagcatgcagaaccacatgacgaacatggcctgctgcatggtggaagagtaattggatatgaccagccccagtcccgacatgaccagtgcgaaaatcagggtggccaggtaaatggtcagtacgtttcctgccggagttaatccgtacaccagccaggccaacagcatgcacaggttcagtaccacaaacccgatggcccaataaggcaacagtttggcaagggtgaaggtaaagcggctgaccggactcacgttgatttgttcgatggtacccgcttccttttcacttactacgttcagggcaggcagaaagccacagagcaggaccagtatcatggtcatcagtgcaggaaccatgaatactttatagttcaggtaaggattgaaacggtagcggacagaatcttgcgaagaagacggattgagtatctgttgcaggtaagcgctgcccagtccgccctttgtaccgttgacggtattgactgcaatgagtgccgctggactttgtccgttggcttgcgctttctcaaagccgcgtggaatttccagcagcatgtcggcctggtctttctcgatggcttgcaggccttgtgcgtaggacggaggaagtgccgtcagttgaaaataacgggaagcttcgatacggtgtactagcctttcggaagaaggactgcggtcgttatcgatgacggcaatgcgcaggttctctatttccagtgtggcggcccagggcataaccagcatcatcatgcaggggaaaagcaggatgaggcggggcaggaaactgttgcgtttcaactgcttgaattctttttctatcaggtaacgtaacatcataggcttggcggtttattccagtcggttcttaaacttgcgggcagtagccgtaatcagtaccactgccatgagacacatcactaccacttctttccatacatataccagtggtacaccctcaatcatcagccggcggacggtttctacgtaccagcgtgcgggaataaggcaggagaggacctgcagaatgcctggcatactttctatcgggaagataatgcccgacaggataatggtgggtatcatcagtaccatggccgacactaacagggcagctacttgcgtatgagtgatgcaggagataagcagtcccaatgccagggatacgaaaatgaacaatagggatactcccaacagggcaggcaggcttccggctatcggtacgtcgagcacaaagacggagagcagcaggatggtcgtcaggttcagcagggaaagcacgaaatagggaactgccttcgacagaatgatgaacagcgggttgacgggagagaccagcaggacttccatcgtgcctgtttccttttcgcgtacgatggagatggaggtcatcatggcacaaatcagcatcagaatcaatcccatgactcccggtacaaagttataggcgctcttcatctgcgggttatagagcagtttattgtacaccatgacaggctgcttatccggttgtgaataggctggggtggttgtagcttgccggatggtttgtagggcttgtctcagaattgtctgggcatacgtactccgtgtgacggccaggttcgggtcggtggcatcggctaaaatctgtatctcttccgaatcgaaacgcaggcgatgcaggtcggagggaaagactacagccagttctatgaggttgcgtcggaacagccgttcgatttcgtcgggagactggacgacatatttcaccgtgaaatactcgctggcatccagttgttccatcactttccgtacatccgtctggagggaaggtgtaaggatggcagtctgtacattgcgcacttcggtcgagatggcaaagccgaaaaggataatctgtacaatcggcatgcctatcagtatcagcatggtacgccggtcgcgcaggatatggtgaaattcttttctgacaaaagcgataaactgtttcatggctgttctgtttgcgtgtgagtaaaggcatgttctcctcgttgggcttcacgtgctaatttttggaagacttcgtccatgtctcgggcattaaaacggtatttcagtccgtcgggagtatccagtgcccgaatatgtccggccaccatcatggagatacggtcgcaatattcagcttcgtccatgtagtgcgtcgtgacaaaaatggtaatcccctggtcggcggcctgataaatcagctcccagaactgacggcgggtagccgggtcgactcctccggtcggttcgtccagaaaaaccagttctggacggtggaagatggctaccgaaaaggccagtcgttgcttccatcctaaaggcagcgaacggaccagggtatgctgctcttcgtaaagcccgatgcgctgtaaggtttcttccgtacgcttgctgatttccttggcattgacgccatagatacctccgaacagacgaagattttcgcgtacggtcaggtcttcataaagtgaaaatttctggctcatgtagccgattcgttttttgatttcctcactttgtgtccgtacgtcaaaccccatcacttccgcctttccttcggaggggagactgagcccgcacaagatgcgcatggcggtagtctttccggccccgttggcccctaggaagccgaagatttctccccgttgtacagaaaatgaaatgtggtcgacagccgtgaacgagccgaaccgtttgacgaggttgtccacctggataatgggcggagtatgtttatcgacggcttttcgttgcaggccgggagggcatagaatctcgctgaactgcttcagtatggcttccggacggtcgatgcctttaatttctccctcgtaaagaaacgccacccggtcgcatcgcaaggcttcgtccatgaaaggagtggatacgacaagggtaatgccttcctgccggaggtaggctaacatctcccagaactcccggcgtgaaacggggtctacgccggtggtcggttcgtccagaaagaggactttcggagcgtgaaccagtgcacaacacaaagccagcttctgcttcattcctcccgacaatgcacctgcccgacgctgcttgaagggggcaatctgttcataaatgacgcgtatccgttcgtagttttcttcaacggtcgtatgaaatacggtggcaaagaaacgcaggttttcttctaccgtgaggtcctgatacagagagaagcgccccggcatgtaacctacgctctgccgtatcgtacggaagtcgacccgtacatccgcatccagtacccgggcacttccctggtccggtagcagcaaggtggttaggatgcggaacagggtacttttccctgctccgtccggaccgatgaggccgaacagttctccttgctttacgctgaaggatacatcgcgcagggcttgtacctttccgtagcttttgcttacatgactgacttctatgaggtttttcatgtcactctcggttttcagaatttgactttcccgtacatgcctagtttgatgtgtccgtcgttttcgacggctattttgacggcatatacctggttggcccgttcatcgttggtcaggatggttttgggcgtaaattccgcttcctcggaaatccagactatcttgccgggataattcctgagttgcgcattgccgaaatcggcaaaaacggtgacttcgttacctaatttcaccaactccaactgtgaagaggtgaggtatgcccgcaggaagatgtgctccatatcggctatcttgaacagcgattttcctactgtagccagttcactgggttcggcatactttgctaagatggttccgttgatgggaacggtgatatggcatttttttaattggtcttccacttgtgccacctggatggcgacagatgaactttgttccgtcaggctggcagtggtattgcccaacgaagaaagttgcgcttccagttgccggttgagtaccgccaactgtgaatcccagtcatccagttgtttgcggttggcagcctgtgctttaagcagattctccacccggtcgcgttcccgctgtgctgtagcaatttgtgcttttgtggcagctatttgccggtggatgtcggggcgctggctctccaccgatttcatctgtgcctccagttgtcgtttcttcaaataaagctgcaccgtatcaatcagtcctacttcggttccttgcgtaaagtgcataccttcttccgcattcaggtaaaaaagtttcccggtagcttcggaagataccacgatttctgttgcttcgaaggtgccggtagcatcaaattcgtctttggaaccgcaggcagtcaggcatatcagtagcagagcttgaaatacatatctttttttcatacgcttgagtattttagggtgaaacgggttagttggtcaggtgttttctttggtgtagatgcatgagcaattgcacttcatgtacggctttggcttgacgtgccagattctcggctgtaatttctttcagcatgtcactgacgctcatcgtgccgttggctactttggcttgggcagaccgtcggatgttttcccgtaatcggataatctcctcgtcttctttcatttgctggcgaagactttggatggtgccgtcttcttctgccagttgtaagtgtgtgttgaataagaataagtcgcgttcgtttctaatttgctggatgcggttgtctaggtttttccggtcgttcttcagggtgtacaggcttccgaaattccaggtaaaccgtgccccgactaagtagtaggttctgaacttgtctttcaatatatccagtcccggattgccgtaggctccttgtgcaaaaagactaaaagcaggaaggtaacccgtctgtaacccctttcgttgtacagcgacagtctgttcttgtgcctcataccaccggagttcaggacggttgaattcagatgcattcgttgccacaggatctggacgtactaacagggtttgtgccggaagttcctttcctgtaagtaaggacagcatgcgcagataggccatacggttgttttctaactggatacgctgctgcttggtttgaagaatctctacctttaccgcgtctacgtctgcatcattggctgtgccgtttatccggtaagcctctaccgttttctggttgcgtgcgagttcttcttccagtaatacattttgtgccagctgctcgtccagtaacaggataccgaagaacacctgattcaccctttcttccagtgtatacaggctcgtatcaagctgtcgctcgtgttcttcggcttcggctttgatctgagctttctggttgcggattttccctccgtcccatatattctgtttgatttcaatcaatgcctgatactggtctttgggtagtcctttcatacccaatcccggaatctcgaaagggaaggtagtggcttcactttgataagatatttttccacttatgctgatttggggcagattgcctttcgctacatttgagagcgtatattgttcggacagttggatcaagtcgtattgtcgtaccagcggatagttttcacgggcctgctgcttgcaactttccaaggtgatttgtgcctgacttatcgcattcaggctccatgcacacaaaaggagaaatattcgtatcataggcattgggtctttattaaaaggttgtatgacaaagatagagggttttgtgtaatctttcggtcctatatgtgtgacggaatgttctttttgttcgataaatgtttgtttatgtcgtaaaaaaggcctgaaatattatctttgtaggaaaacagggtatcaaatgaaatcgaatcatctgttgttgctggcattgaagaaagtgcgtgaacatgtgggagaagggacgaacactttccgctttcttacttccgaattgggattgcttcgttccattcagggaatagccgacgtaattcattttatcccgatggaaggacagccctatcggttgaccgaggggcgagtggtgttttttcgtgcggggacgcttcggctgcgtatcaatcttcgtgaagtagaatttaaggccggtgatttgctggcggtatctcccggcacggtgtttgagtttctttatgtatctcccgatttagatttggctatgctggccttttcaaacagtttgatggagaattggcagaaagaggatttgttgcagacctatttgcaggggagattgtttttgcatctgtctttaactgcgaaagaagtgcagcgcatggagcagttgtttgccttgttatgggaagtggtgcacgaccggccttttccgagagcttccgtgcagagtttgatttctctgtgctttcatcaactggattttgtcaggaaaagcagtcaatctactgaaaggcagcaacacacgcggcaggaggaagttttcaatcgttttttagagttggtcaataaatatgcggctcgtgagcggagcattacgttttatgccgaccggctttttctgacaccgcgttatttgagtacactggtccgtcaggccagcggacgcacagtgatggactgggtaaatgaggcggtgatgcaggaggccaagctgatgttgcgtcacacggataagctggtttatcagattgccgatgagttgaattttcctaatgcgtcatttttcagcaagtatttccgacgcatggcaggaatgactcctaatgattatcgaagaaaggacgaataaggagtttcgtgtttatcaggcattttcttctttcatgggagttctgtctatgcgcagtgatttcagtactggaattgtaaggggaagcgctaacaggaaagaacataaatcggctgcggcctgacacatttccacaccctgtaactgcagaaagtacggcagaatcagtatcaaagggatgaagaacaaaccttggcgggaggaggaaagaatgacggcccggcgaggctggcggatagtttgtagcaacatgttacatagtatcacccaggctcctaatgggagtgtaatgagctgccagcgcaaggcttcggctcctacggcgataacttgcgggtcttcttttcggaaccaggaaactacttccggggcataaatgtagccgatgagggagcagatggctaagaagataacgcctactttcacacagtaccagaatccctgtcggacacggcggtttaatcctgctccgtagttgaatccgcataccggctgaaatccctgtccgaaaccgatgacaaaggaattgatgaacatacagatacgggttacaatggacattccggcaatggcagcatctccaaagtttccggctgctacattcaataggatagtcgatacactggccagcccctgacggcagagagaaggacttcctccgtatacgatttctttcagataggctggagtgggagtaaaatgccggtaatgaatacggatgttttctcctttccggtccatgaagagcaggatggtgaagctgcatacctgactgatgaaggtcgaccaggcggctcctgcaattcccatgtcgaatacgaatattaatagtgggtcaagtccgatgttgagtacggcccccacaatgataccaatcatggcataaacggcgttcccctggaatcgcatctggttattgagcaccagcgaagaggccataaaaggagctcccaacaggataatccctaaataggtcttggcgtatggaagaatggtaggggtagaacccaatgcccggcagatagggtccaggaaaagcaggccgacaagcgcgatggcacaaccgatgaggaatgcactaaagaagcccgtagccgccatcttttccgcactgcggtagtcgcgtgcacctaatcttctggaaataaaattgcccgaaccgtgtccgcagaaaaaaccgaatgcctgaatgatggccatgatggaaaaagaaatacctacagccgcagtagactgggtattgattttcccgacaaaataggtgtcggccatgacatagaaagaagtgaccagcatactgatgatggtcggaacggccagtcctcggataaggcgaggtaccggtgccgtggtcataagcgtatatttatcttggggcataggttgtctgcttgtagaatgtgggcaaaagtacgaaaaaaatcccccttattttcctaaaaatgggcaaataagggggatgaaatgtaaaaaataagtactgatatagtctgctgaaaattagaatccagctagttcaaccactttgtcaactgcggcattcaatccgtcggggttcttaccaccggcagtagcgaaatgaggctgaccaccgccagcgccctgaatcagcttagcagcttcacgtaccagctgaccagcattcagtccagctttcacctggtcttcactcatggttacagtcagcaacggtttgttttcgaatacactaccgataactacaaacagattttctgtgaactgtcctttcaactggaaagcaatgttcttcactgcatctgccggcatcggaagtacagctttgattacttttacgccattgatttctttagcaccttcaatcagtttgttcttaacagcagcttctttctctttcatgaattcttccatctgtttcttcaagccggcgttttcttcgatgtacttggagatagcagccttcaggtcgggtgcattgttgaataatgctttcaagtcgttgatggtatcttgtacggtatcgaacatttcttctactttcgcaccggtaaccgcttcaatacggcgtacacctgcagctacagagctttcagaaatgatttttaccataccaatttttccggtagccgatacatgtgtacctccacagaattcgatagatgaaccgaactgtacgacacgcacttcgtcaccgtatttttcgccgaacagggcaatagcacccagttccttagccttttcaattggcaggttgcggtattcagtcaaaggtacattttcacgaatcttggcatttaccaggtgttctacttcacgaatctgttccggagtcactttctggaagtgagagaagtcgaaacgcagtgaatcaggagttaccaaagaacccttctgttctacgtgagtacctaatacctgacgcaaagcttcgtccagcaggtgcgtacaagagtggttggcagcacaagcagcacgtttgtctgtatctacacatgccatcatcggagcttccaggtgttccggaagtttcttggcaatatgaatcggaaggttgttttccttctttgtatcaatgatgtcgatagtttcgaattcgcttaccaatacaccggtatcacctacctgaccaccactttctgcatagaacggagtctcgctcaatacaatctggtagagagtctggttcttttgtttgatctggcggtagcgcaggatgctggtttcatattctgtataatcgtaaccaacgaaagttgtttcaccttctttcagtgtaacccagtcgccggtttctactgcagcggcattgcgggcacgttctttctgtttctgcatttcagcttcgaagcctttcacgtcggcagtcaaaccgttttcacgcaaaatcagttcagtcaagtcgaatgggaatccgaatgtatcatacaatgtaaatgcatccactccactgatttctgtcttgccggcagctttggtttcgttcatggtcttttcgagcagacggatacctgtttccagtgtacggaggaatgattcttcttcttccttcatcactttttcaatcaaagcctgctgagctttcagttcagggtaagcaccacccatgttttcaatcagcaccggaaccagcttgtacatgaatgcctgtttctgtccgaggaatgtataagcgtaacgaacagcacgacgcaggatacggcggatgacataaccagcctttgcatttgaaggcaactgaccgtcagtgatagagaaagcgatggtacggatgtggtcagcaactacacgcatagccacgtctgtcttttcatcgtctccgtatttcttaccggacaaatcaccaatcactttgatgataggctggaatacgtcagtatcatagttggatgtttttccttgcagtgtacgtaccagacgttcaaatcccataccggtatcaattactttcgcaggaagcggttccagagttccgtctgccttgcggttgtattgcatgaacaccaggttccagatttcgataacctgcggatgatccttgtttaccagttcgcgtcccggaatagctgctttttcttctgcagaacgagagtcgatgtggatttcagagcacggaccacaaggacctgtatcgcccatttcccagaaattgtcatgcttgtttccgttgatgatgtggtcttcagggaagaactgtccccagtagccggcagcttcatcgtcacgggcaagaccttcttcaggacttccttcaaatacggtgacatacaagtctttcgggtccagtttcaatacttctaccaagtattcgtatgcccagccaatcacttctttcttgaagtagtcgccgaatgaccagttacccaacatttcgaacatggtgtggtgataggtatcgtggcctacttcttccaagtcattatgttttccgctcacacgaagacatttctgtgagtcggttacgcgtttgtatttagcagggtggtttccaagtatgatatccttgaactggttcataccggcattagtgaacatcagggtagggtcatctttgataaccattggtgcagaaggcacaatctgatgtccttttgactcaaagaatttgacgaatgagtcgcggatttcatttgctgtcaacataatcgttatattgtcttgtagttaatattctcaaaattgatttgcaaagataattggttttattatttttgtctgtatgtttggtgcaaaaacttgatgttttgttgcttaaaaatttccaaaatcgaaccacatgcgtaaagtctattatatctacaatccgaaaactcgtacttacgaccgtatttatcccaccgtacgccagcgggctttgagttacctgcgtcaactctttgtcggtatgggactgggggcaggcagttttatcctgctgttgtggattttcggttctccttcggaaaaagaccttcgtacggaaaactcccgacttttgtcacaatatgccattctttcctctcgtctggatgaggcggaaggagtgatgcaacgtctgcagcaacgtgacgacaacatctaccgcgtaatgatgcaggccgacccgttaccggatgagcagcgttcggctactgcaaataatgcacgttataatgaactgatggacatggccaacagccgtctggttatccatacactacagaaaatggatgatttggagaagaagatttatgcccagtccaaatctttcgacgaagtggtggggctctgtaaacagcatgacaagatgctggcctgcattcccgccatccagccggtttcaaacaagaatctgaaacagactgcttcggggtacggcatgcgtgttgacccgatttataaaaccgtgaagtttcatgcagggatggacttctctgccaatatcggtacgccggtatatgctacaggaaacggtagggtaaagcaagccggatgggatggactgtatgggaattgtatcatcattgaccatgggtttggttatgtgacccgttatgctcatttgaataagatagaagtgaaagtggggcagaatgtggcacgtggggaagtgattggtcaggtaggctctacgggaaagagcaccggtccgcatttacattatgaagtgcgtgtaaagggaaagattgtcaatccggtgaactattatttcatggacttgaatgctgatgattacgaaaagatgattgaattggctgccaaccacggtcgtgtatttgattaaaaagaattacttgttatggctttgaaaacagataaagaattgaagctctattattctatcagtgaagtggcaaaaatgtttgatgtaaatgaatcattgctgcgctattgggaaaaagagtttccgatgatttctcctaagaaaacagggggaaatgtacgtcagtaccgtaaagaagacattgagaacattcgcctggtgtatcatctggtgaaagaaaaggggttgacgctgtccggtgccaggcagcgcttacggcagaacaaggaaggaaccatgcagacggccaatgtggtagagcgtttgaagcgtatccgcgaggagttggtgagcatgcggaatgagctggattacttgacgtgagtctttaatattatagtatgaaaaatggcatgtgagatttacatacgatctcacatgccattctttatttctgaaaacttttcaaagattccttacaaatcccgttcagtccgcagctttcacatttaggagcacgtgccgtacaaacgtaacgtccgtggagaatcagccagtggtgtgcggtcgggataagtgcttcagggatgtattttaccagttgtttttcagtagccagcggagtggtacacgtgcggggaaccagtccgatgcgatgacttacgcggaacacgtgggtatcgactgccatggcagccttattgaataccacgctctggataacattcgctgttttgcgtcctacaccgggtaatttagtcagctcttccagcgtgtcgggcacggtactttggaaatcgcgtaccagcatctgcgccattcctaccagatgcttggccttgttgttgggatagctcacgctgcggatgtattcgaacactacttccggagtggtggcagccaaagcttcgggggtaggaaaatccctgaacaggggaggggtaatcatgttgacccgcttgtcggtacattgtgcgctgaggatgacagctattagcagttcaaacgggttgctatagtgcagttccgtttcggctacgggcatggccgtctggaaatattcgatgactttctgataaagttctttttttcgcatactgtgtagaataatttaggtgaatagtttgtgattaataccatttcttccgtttgaaaaacaggtatactccgatgccggtaaccagcatcagtccccaggccatcaggtaaccgtatttccagcccagttcgggcatccattcgaaattcattccccatatacctgctaaaaatgtcagcggaatgaagatggtcgatacgatggtgagttgcttcatgatgttgttcatccgctggtcattgttcgacaggtaaaggtctaccagggccgaaatcatgtcgcggcagccgtcgagagtctgtagtacgaattgtagatggtcgtttacgtcgttaaagaacggccggttggctttatgaagcagtacgttgtcggcatgaaacaacttgctcatctgctctttaagaggaaggatgcatttcttgatgaggcgggcatcctttcgatagggttgtatatcctctaatgtcagtccgcttctggtttccggtgacagcaatgattcctccatatcttccagctggtcttccattcgggatatgatagacataaagctggccatgacactgttcagcatgacgctcagcagaaaatctgactggcggttccggattttcagggtattgtttttcagtgccgtgtgaatctcattgaagaaatcgctgtcgtgttccatgaaggtaagtacgaaattacttccctgcacaatgcaaagctgctggggagtgtacgtgttttcttcgtctaccgacaactgtttcaggatgaccacattgtaggtgtcatgctcttcaatttttgtcagatgctccgcattgagaatatcttgtgtggtaagaaagtcaatgtgaaagaaatcgcagacttcctgcacgatttctgtattctgcaatccatgaatctgtacccaattgatggcatccggccggatgaaaggggcaaactctttgatggaagctccctgacgatattccagaatttctgtgttgtatgtgcagaaatgcaggtgagtcggcgtatggctggctcccgtataattcagcttttcgcttagcaggttgttttttgtcatggcactttcggtttaatcaatacgtttcaataccacctcttttttgtcgatgtatttatcgaagcggaaagacggcatgcctaatgcgatgccggcatgaacggttccttcaatacctaacagcttttgcaactttcttttccggtccattcctgctgcactgcacacgaatccggtgtagaactgtgagactcctgccgcttctgccatgagtgaagcattctggtaggcaaggttgcagtcctgacatccgaaacgttcttttttgtcggtatagaaaaagatggcagccgtggcacctctcaaaataccgtcgttacctcgtccaaattcctcatgcagtcttttgaacaccggcacgtagcgatagcccgaaggcatgagcggtttcagtatcattttcagcaacgggttttccactaagtttactatcgacataaaggtaccaatggtgatgcggctgacttccttcaaggtttccgggcgggtgaccaataccattttgacttcttgtgcattggttgccgtcggggccctatgggcagcctctatgatacgctgtaacagctcttccgagactttttctttggagaatgcgcggttcgagcggcgggaaaggatgagcagttccaactggtcggcagtaggaagttggctgcggtcgatggtatgaaccttttcgggtggaaaatcagtgtgatcaatggagttactcgggcagacggccacgcagtgtccgcaactgatgcagtcttcggcattcacttcaatacctttatcttcctgaagggtaaacagggcagatgggcatattctgacgcatttcttacagcgtatgcatgtattctgattgatatgtatttgagccatgatatggaatgaaattaattaaacattatatttacttaaaatacattcttccgttttccatcgttaatgtttttaaaattggctgattgacgggggtagaagaattgacatattcgagagtgttttttcgtaaaataaaatcaatcttattaccttgttttttgatttcattgatgtaacaaggcttgttgaacaccaacgttgctttacctgattttaaaacaatcatactgatatatggaggcaaactttgaatgtagattcctacaaaaatcaagactttcgtatttttatccaggtcaatactataatagaatttggtcttggttattccaccatccggctctttgtttatatacctccatccatcaactttatttagttttaaaacttctttcccttgatgtaaaacttgaattatatgtacatcacctggatcattttcccaatttctatatttgagacagtttattgtataggaatcaccattctgtaaagattcatttgtagtttgtttcaaaatataaggtgttatattattataagttttcttcctaaatgggtctatgaatttgctttttgttacaatttctcccgttgttgtttcaaaaataagctcttgcgccttcgtagtttgaaccaaaagtatcattactaaaatagtcacaattgttctcatgtttattttatatttattgaattcaacattggtttattttattatttccatcacaaggagtatgaaatattgtgtataatacttctgttctttgtcttatttactggagcgagatgctttttcaaacatatctttttcaaagatttctttggtttcgtttactggaagctctttacctctcctttaatgatatcttcatttcctgaatatagtgtaaagataatttatattttccatattcttatgatgcaaagttgattttgtgtgtcaacgaatccttttcttttcattgttttttgaaaatcatattcctgttttctgtatctgattctaatttttgtaacgctttcattctttagtttttcattttgtgaattggccttgtgaagtttttcagatatcgttattctttttatgtttccttgacgtaaaacttacggttcccggtgcggaaatgtaggttttgcgtaaggagaacgtaggtttttgcaccgagagacataaactttgaggaaggatttgtttttgtttccttcatgttttagaaaaacaattgcctatgtaaaaaaggtaaatctatttggttgtctataaattgttttatatatttgtttcgttaactattgctttgattttgtggatgttctgattgtaaagaatccttagttcggaagtctgccgttcgtatctatattaaaattttatcgtatgaatagagtcctcaaaatttgctgtcttttgtatgtatgtgtactgtctttcagtactggggtggctcaggtggtagatactgcaagatgggatttgaatcgtatctcgtcttggatgttgacgcagattcagtatccggaagatgcttataaatatcatacggcgggaatagagcaattgtgtcttagcgtggcatgggatggaagagtgtttgtttccagccgtttcagtacgttgaatccggcatttgaaagggagattgaaagggtcgttaggagggctccacggtgtaatactccgttgttggatatagaagacgccaataaatacatgtggattgacttttatgaatttcttccggaggaaaagcgtcgggaggtggaacggatttctttgtatatgccacctcgttttgcttcagaagggcaggtgttgcgtccttttaatggaagggagaattttatggaatggatatgtgctcggatgtctgcatcgggagttgtgacggaagatacgctttccattgagtatacggtgaatgaaaaaggatgtgtgtgtgatgtggaagtcgcaggcggagatgctgtaatggttagtaaggtaaagcaaattatggaggaatctcctcgttggagacccgccaaaacggtagataagcgtgatattgcagttacatggcatgattgtctgattgcaaggagtggaggagcgaaaggagagaaaagtgtttatataccctatttgaaggatgtgtatgccaacactcatacctctccgtctgatgttgaaaaggtaattttaaatcctgagataccacctgtttatcagggggagagatctttcctgggagatttagccactcctttcaaggatttgttgcagcagaagaaaatcaatgaggattatagtgtggcaggttcgtttgtgatagaaaagaacggaaaggcaagcaatattcattttgattcgttgcctgatttcgaaggtttcaatgcggacagtattttgagaacctctatcggttgtatggattgggttgccgcacatcagggagggatcccggtacgcacgaaatattcttttgcttttgtgggacacaagaagtctgttcgtgtgctagtggagccggattataaagtctatggtaaacattttattcatcttcaggctaatccggctaaaatgccgtatggttatatattaaataatggggatatatatgcttatccgtttacaacatctggtatgtttgattatcggagctattataaaggcttgttttattatcatcagatgcaagggaagggaaatctgtcggataagtatctgcaacaggtttatcgcaggtatgtaagataattagattagaaagatgcttagtcccgaaaattctttgtatctttgcgcccgattaaaaagagaacatttacatgcgatgccgtgaatagcggtcgtgtattctagaacaccacgtaaaaaacaggagcgatgaaaaaagaaaatctcgtatcagtgccttttatggttttgggcattgtgttttgtgtctgcttggtagcagctaatcttttagaaaccaaagtcgtacagctgggtccgatttctgtaactgccggactcattgttttcccgatttcttacattattaatgactgtattgccgaagtatggggcttccgtaaggcgcgtctgattatctggatgggcttcctcatgaatttcatggtagtggccatgggacagttggcagtggctcttcccgctgctccgttctgggagggagaagaaagcttcaatttcgtattcggcatggcacctcgtattgcggtagccagtctgacagcctttctggtaggttcgtttatcaatgcgtatgtgatgagccgcatgaaagtggcttcacacggaaagaatttctctgcccgtgccgtattgtcgaccatagccggagagggagccgactcgctgattttcttcccgctggcttttggcggactgatgccggtgagtgagctggccaagatgatgctggtgcaggtggtactcaagactttgtatgaagtgattgtactgccggtaactgttcgtgtagtgaagtacatcaagcgagtggatgatacagatgtatatgacgagcacatctcgtataatgtgttaagaatcaaggaaatctaagaaatatggtaaataataaggaggccctcgtcgtttttagcggcgggcaggattctacgacctgtcttttctgggcaaaaaagcattttgagaaagtatatgcactgagctttctgtacggacagaagcatgaaatggaagtggaactggcgcgtgaaattgcacggaaagccggggtagagtttgaagtcatggatgtgtcatttattgggcacctgggaaaaaactctctgacggatacgtctattcacatggatgaggaaaaaccgaaagattcatttccgaatacgttcgttccggggagaaacttgtttttcctgagcattgcagcggtttatgcgcgtgagaaaggtatccatcacatggtgacgggggtatcgcagacagatttcagcgggtatcccgattgtcgggactcgtttatcaagtcgctgaacgtgacactgaatctggccatggaagaacagtttgtgattcatacaccgctgatgtggattgacaaggcacagacttgggcactggccgatgaactgggagtgcttgacttggttcgaaatgagacactgacttgttataatggaatcccgggtgacgggtgcggacattgtccggcttgtaaattgcgccgtgaggggttggaaaaatatttggcttcaaaacaaaataagtaagtatggaaagaaaagacgaactcactttgttaggtaataagaaaacagtatataagcaggattatgcgcctgaggtgctggaatcgtttgtaaacaaacatccggagaatgattactgggtacgtttcaactgtccggagtttaccagtctttgcccgattacggggcagccggattttgcggaaatccgtatcagctacctgccggatgtgaagatggtggaaagcaagagcttgaagctgtatttgttcagtttccgtaatcacggcgattttcatgaagactgtgtgaacatcatcatgaaagacttgattaaactgatggatccgaaatacattgaggtgacgggtatctttactccacgtggcggtatttccatttatccgtattgtaattacggtcgtccgggaacaaagtacgaggaactggctgagtatcggatgaagaatcatgatttgtaagccgggagtttaccgaaatataaaaggatacgggcggagaagcagcatttgaatgtttctccgcccgtatttttatggatatttcggcatcaggaaagttccaggccgagggcttccttgagtttcagcagactggggtttttcttgctcatcatctgaaaacgctctacgtggctataggcacgcacgttttcgttggcttcgcttacccgtgtagtcattctgattttgcggttatgcagcttctcttgcagatgggcttctattttcggtgccagttgctgcatgtatttctgaaccatgtcattgtccaccgctacttcaaatgtctgttggtcggccagcaggtgagggtgcatgttcatcatgcgtccggcattggcagcctcttctttaggtagcagactggcaaactcacgccagtaatagcctaagtctttttcattgaacatgtaatcttcccatgtctctgtcacgggctgttgcacgggcgcattggacgcagttcgtgcagctggctctgcggtggccgtctgtgtcttgcggatagacatgcctaaactgccggctttgatgaccggtgcttttctttccgtactgactttgggcagtggactgcttttggtgtaaggtacttccgattgttgcaaggtgcttgtataaggttgtgcacttgctgctgccggttgaggctgaggagtcggctgagagaccggagctgtagctgcatgagtcgcttgtgcgggctgggctacaggctgattggcttgtgccgtatggaagacgggggataactgtttcttagggccatgcccacttccggcatcttccggttcggctgtgagttgtgccacctgaataagggtaagctctaccagcaggcgtttgttcttactttgccggtagttcaggtcgcagtcgttgcacagcttcatggctttgtacaggaattgtggcgtacatttctgcgcttgagcctggtatcgatcccggatagaagcaccggcttccagcagttgcagggtagacgggtcgcggcttaccagcaggtttcggaaatgcgaagtcagtcccgtgatgaaatggttgccgtcaaatccttttcgaagaatatcattgaacgtgagcagacattcggctactttattttccaggaagaaatcggtcagcttgaaataatattcgtagtccaatacgttcaggttctcaatcacactttggtaggtgatgtgcccgttggtgaagctcactacctggtcgaagatggagagggcatcacgcatacccccgtcggctttctgtgcaatgacgttcagggcttccggttcggcctcgatgtgctccttgcgggctacgttctccaagtgttccaccgtatcgttgaccgtgatgcggctgaagtcgtaaatctggcaccggctcaggatggtgggaagaattttatgcttctcagtggtggccagaatgaaaatggcatgctgaggcggttcttccagtgtcttcagaaaggcattgaatgcggcggtagacagcatgtgtacctcgtcgatgatgtacaccttgtacttgccgatttggggcgggatgcgtacttgctcaatcaaggaacggatgtcttcgactgagttgttggaggccgcatccaactcatggatattataggaacgctgttcgttgaaagccttgcatgactcacattcgttgcatgcctctccttcactggtcgggtgaagacagttgatggtcttggcaaagatacgggcgcaggtggtctttcctactcctcgcggaccgcagaacaggtaggcatgcgccagtttatgattggcaatggcatttttcagggtcgtggtcaatgcacgttgtcccactacggtatcgaaagtagagggacggtatttgcgtgccgatacgatataattttccatgtgtcgattcttttgtttgattccttgatatttctgcaaatgtacataaaatctctttcttgtcatgggcttgctaggaaataatttctatctttgcaagggtaataaagtgtgtattttatgggtaaactggctaatatatgggcttttatcggaaggcataagtattgggtaaccatcggtgcttttctgttgattatcggagtgttggatgaaaacagtctgatacgccgcatagcacataagcgtgaaattcatcagttgaatacggaaatagagcgttaccggaagcagtatgaggaggacagcaagttgctgaaggagattacctcaaataaggaagcattggagaaggtggctcgtgaaaaatacctgatgaagaaagaaaatgaggatatttttatttttgaagaagacaagtgatggaatcaaagatgaaggataaactggctgtagtgggagccattgtgttgtttattggcttggcattgcagtttgtaaaactggcatgggctccgtatgtgtatctggtaggggcctgcttgtttgcctacgtacagctggtttccgattataagggaaagaatatcattatccgtcgtttgcgccgtcagcagcttttgggagccatgttgctggtgttgaccggagtaatcatgttgctgtggaaacggaacgaatggattgtttgcctgacggtagcggcagtactggaactttacacggctttccgtattccgcaggaagaagcaaaggagaattagtgtgacagtataaattaaagaaccatgaaagaaaggtattggaaatattcactgattgtttttatcattggattgggatatttgctgttccgccaggcacagccgtttatgaacggtattctgggaggatttacgctttatttgctgttgcgtaacttcactttctggcttcagaccaaaatgaagccggcattggctgtatggctggtgacaattggagtgacactttttattctgataccactttctctgtttagctgggctttggtgagccaggtttcgaagatgcattttgatacggaggccatcattcgtccggcatggcatgtgattgattttatcaaagaccgtacgggcttcgatattttgtcggagaagagtctttcgttctttgtgtcacaggcttcctccattggtcagtcggtaatgacgggggtgagcgacctgctggttaatctgtgcgtggccatcatgctgttgttctttatgctttacgaaggaaaacccatggagcactatatatctacattgttgccttttaaagccgagaataagattgaagtgttgaagaaggtacagttgatggtgcgttccaacgccatcggaattcctttgctggccattatccaaggatttatatcgttaggaggctatttgatttgtgatgctcccaacccatttctaagtgccatgctgacagcttttgcttcggtaattcctttggtgggtaccgctttggtatgggtaccgattaccatctacttcctgattgtaggaagttgggtaaatgctttgatgatgctgggatatggagctatcatcgtatcacagtgcgataatctgatacgtttcctgcttcagaagaaaatggcggatgtgcatccgttgattacgattttcggtgtagtggctggactccctttatttggttttatgggagtgatatttggtccgttgctcgtatcgctgttccttttgtttgtggatatgttccggaaagaattcttgctggaagacaaccaatcggctacgcctgattgattcgttcttccaggaatttcataatttcttctgcttgtgtaggatggaaccacgtgatttccgggtctctcttgaaccaagtcatttgttttcgggaataaatgcgtgagttttgcttgattttttctattgcaaaggggagctcccattctccattcaggtagttgaatatctccttgtagcctacggtattgagtgaattgaggtgcttgtaggcgtatacgcttttgacttcctccagcaatccttctttcatcatttcatccacgcgctgattaatgcgctggtaaagctcttcacggtcgcgtgtgaggccaattttgatgatttgaaacggacgttctttggtgttgcgggtgcggaatgaagtgtaggtttttcccgtcatataacagatttccagtgcgtgaatcacccgcttggggtttttcaggtctacaatgcggtaatactccggatcgagtacccgcagttctgcacaaagttgctccagaccttcactttcgtagcggcgcaacatcagttcgcgtgtttccttgtccaccgtaggaatatcgtctattcctttgcagactgcgtcaacgtacatcatggaacctccggtcatcaccactaccggatgagtcctgaataactcttccagcttctttagtacttccgcctcgaattgggctgcgctgtagtaatcagtcagttcaagggtacctacaaaatagtgaggtactcgctttaactggtcgggagtgggggctgcggtaccaattttcaagtctttatacagctgacgggagtctgaagagatgatagaggtatgatacttttcggcaatggaaagactcaattcagtttttcctacaccggtaggaccaataagtacaataaggacgggctttttcatttgtatgtggggataggtcggtagggaaaaaagaaaatgtcattctgagtcagacccaggatgacatttcttatattgtttcaaactgatgtaactacgtgtcagctctttttaatatttatcttcatcataaggatttccgcttccttcgttgatgtcaaaaccttccgggtcaaagtcttccatgtcgtagtcttgatcgccatagaagttttcgtcaaggtcgagtgcagcgtttgtattcatctgttcatcaaaatcgatggtctgttgaggagcttctccatttttacgagtgcatactgccttgtccaaatcttttccggtgatgatttctgaaagttcaatgaagaatacacgttcagcaagtgggtcaaacacatatatcatcttttgtttttcatcttccagcaattcgcttagaggagtttctctcatgatgtatgtatcttcttccgagcttccgcttcccatgtcttccagcgttatttctgtttctttttcccagtcatcgtcacagatgaagaaagaagtcatctggtcatctttgtatccagttgatttcagaatagcttcgtgaaggtcgtagaaagaagcttcagagtcgatttggatttctcttaagaaatcatcgacttcgtcagatatgattctaaatttgtataccattttctttttgtcttttgttgatgggggtaaatatacaaaatcttttttatcggatgataccgcgctgtgagttttccacaaatgaaatgatgtattcaatttcgggtgtcatcggcatttcagcttttatctgtgcaatggcttccgtaacatttttcccactattgtaaataatgcggtaggcattgtggattatttcaatctgctcgtttgtaaatcctcgacgacgaagacctacaatattgatgccacaataagcaattggatctcttccggcaatgatataaggtggtatgtctttgctgaaacggcaaccgccctgaatcataacgtagcttcctacatggcagaattgatgcattagtacaacaccacttacgatagcattgtcatcgataatcacttctccagccattttggtttggttgccaataatacatccgtttcccacaatcgtatcatgagctacgtgtactccttccatcagcaggttattattacctactacagttttacctttggctgctgtaccacgattgatagttacattctcacggatggtattgttgtctccgacttctgcagtggtttcttctccgtgaaatttcaggtcttgtgggatagctccaattactgctccggggaatatacggtttccatttccaatacgggaaccatacagaatgttggcattcggcataatgacattattgtcaccaatgactacattcttgtcaatgaagacaaaaggacctatttctacgttctccccgattttggcttccgggtctatatatgctaaaggactgatcatgttacttgttttttacaatttgtgccataaattcagcttcgcagacaatcttttcacctacgaaaacatatcctttcatggtagatattcctcggcgaataggtgccatcaattcgaccctgaaaattaaagtatcacctggaaccactttctgacggaactttacattgtctatcttcaagaaataggtggaatatttttccggttcgtctactgaattcaaaaccagcaaacctcctacttgagccattgcttcaatttgtaatacaccaggcattacaggttcttgcgggaaatggccttggaagaatggttcgttggatgtcacatttttaacacccacaatatagttggctccaatagcaattactttatctaccaactggaatggataacgatgaggtaataattcacgaatacggtttacgtccatcaaaggctcttcgttacagttgtaaaccggagcttgtatttcgtgcatgcggatttccttccggagctggcgggcaaatttgttgttgatggtatgtcccggacgggtagcaatgatgcggcctttaataggtttgcctactaacgccaaatcaccaataatgtccagcagtttatggcgtgcaggttcgtttggccataccaatggaatgtggttgatgtatcctaaatggctcgcatccatgtgaggtactcccatcacgtcggctaacttatcgaagttctcctgtgtcatctgcttttcgtagataacgatagcgttatccaggtcgcctcccttgatgagtccggcattcagcagcggctcaatttcacggacaaatacgaatgtacgtgcagaagcaatttctgtagggaagcattccatattttccaacgtagcatattggttggtcaatattttggagtcgtatgaaatcagtgtgttgacgctgaacttgtcatcaggaagtacaatgatggaagaacctgtttcttcatcacggaactcaatctttgacttgatgatgtaataatctttcggagcagcttgttcttcgatgcctacgcgcttgatacattctacgtatgctttggcacttccgtccaaaataggaaattccggtccgtcgacttgaatcaagcagttatctatacctgctgcgtataatgcagccaacgcatgttctacggtactaacttttaccccgttttttgctaaaactgttccacgggttgtgtctaccacattttctgctacagcatctaatatgggctgatcgtccaaatcgattcgctgtatcttatacccgtagtgctctggggcaggattgaacgtaacggtcagtttaactcccgtatggagtccctttccattgagtgaaaagctgccttttaaggtttgttgtttcaacatgggtttatttatttagttgtttttttaattcttcaatttccttttgcaggcgtccgagttccacatacatatccggtagtttcttatagatagctgcagaacgtgcgaactgtttcgggtctattgctggatagcccattaatgtagtgtttgattttgtatttcctggaataccagactgtgctcctacattgacgtggtctcccaccttgatgtgtccggcaactcctacctgacctccgaacatacaccattcgccaattttggcagaaccggcaattcctacttgtgatgccatcacagtgtgtttcccaatttccacattgtgggcaacctgaatcaaattatccagtttcactccctgtttgataagtgtatgtcccattgtggcacggtcaatacaagtgttggcaccaacttctacattgtcttccagctccacaattcctatttgtggaatcttttcatagccatctgctcccggagcaaaaccaaatccgtcggcaccgattacggctccggcgtgaagaatacaattgttcccaattctgcaatcctgatagatggttacatgaggataaataatggtgttcatgcctattttcacattgcttccgatggtagcctgcggatgtatacatacattgtctccaatttcagccccgtcttcgatgcacgcaaatggaccgatgtacacattctttccaattttggcactttctgcaatggatgctaacggacttacaccttgtttcttggggatactcatttcatataacgccatgagtttggccagactctcgtatgcattatccactttgataagtgtggtctgaagttcatgttcaggttcgaaatctttatttaccagtacaatggaagatttcgtatcgtagatataatgagtgtacttaggattggatagaaaggataatgctcccggtacaccctcttcaattttggcaaaggtgtgtactgtggcattttcatcaccaactataattccctggatgtattccgcaatttgcttagctgagaactccatattagttatctttaattccttggttttccttggttgttcttcaatatttagttgcctgaaaaagcatacttactacttaattatgcaaattacgtattttttttttacatatccgtgaaaaaaagcaattatttgcctgaaacgaccattaattttcattggtatcgtataacaaatgcttcggaaggttgtttttatatgataaaaaagaagtacaaaaattcctgttgagaatctttgtacttctttgtatgtggaaactaattgttgcttagaggatagcagcgagttctttttccatttgctgctgtaccttttgggcttcttccgcagctacattggcaaagttttctgttttgtctgcgtagataatggcgcgacttgaattgacaatcaatccacattctttagtcataccatatttgcaaacttcttccagtgaaccgccctgagcaccgatacctggtaccagcaggaagtggttgggaacgattttgcggatgtcttcgaacatacgtccctgagtagcacctaccacatacatcatgttctggtcgttagcccattcctgtgatttgcgtaatactttttcgaacagacgttcgccttctgtatcggtagtcaattgaaaatcgtgtgagcctttgttggaagtcagtgccagtaggataacccatttaccttcgtaagtaaggaatggagttacgctgtcttctcccatgtaaggagctacagtgacagaatcaatattcagttcttcaaagaaagtgcgggcatacatggcagaagtattaccgatgtctccacgttttgcatcagcgatgatgaactggtctggatagtttttcttaatgtattctactgtcttttcgaatgcaatccaacctttcacgcccatgctttcataaaaagccaggttgggtttataagcgatacagtagggagctgttgcgtcgatgatagctttattaaatgcgaaaatcgggtcttcttctttcagaaggtgttccgggattttctttatatcagtatcaagtcctacacacaaaaaagattttttctttttgatgttttcaaataattcttgtttgttcatgacacgtttattttaatgataattatatactccttttgtacgcgggtagggataaaattgtacacgcgtaattataattcactctctttcaatcgctctgcattttcagccacaatcaggtggtcgatgcagtcctgtatgtcaccgtccatgaaagccgccaggttatagatggtgtagttgatgcggtggtcggtgatacgtccttgtggatagttgtaagtacgtatcttagccgagcggtcaccggtacttaccattgtcttacgtttggaagcgatgtcgtcaatgtacttttggtgttccttgtcgtagataaaggtacgcaaacggctgagggcacgttccttgtttttcggctggtcacgagtttccgtacattctatgaggatttcttctacgataccggtgttcggatttttccagttgtaacgcaagcgtacgccagattctaccttgttgacgttctgacctccggcaccgccacttcggaatgtatcccatttgatttcaccttcgttgatttccacgtcgaaaggttccgcttcgggaagtacggctaccgatgcggccgaggtatgtacacgaccttgtgtctcggtagcaggaactcgctgtacgcggtgtacacctgattcatatttcagtgtaccgtacactttttcacctgttaccgaacagatgatttctttaaaaccacccgcagctccttcgttggcgctggaaacttccagtctccatccttttgattcgcagtatttagaatacatacggaacagatcgccggcaaagatggcagcttcatcacctcctgtaccgccacgaatttccagaatggcatttcggtcatcttgcgggtctgccggtactaacaataattttatttcttcttccagttccggaatgcgagcttcacaagcggccgcttcttcacgagccatttctttcatctccggatcgttctcgctcatcatcattttggcttcttccaatccgtttagacattgaagatactccttgcgggcagccatcaggtcgcccagctctttgtattctttggtcagtttgacgtatcgtttctggtctgctatcacgttcgggtcagtaatcagtgtagacacttcctcaaaacgtgacaccaatccttcaagtttctctaatatggtgttattttctgccatttaaatctttttgttttttaccacaatcagccatcgaacagaaatgttataggtataccaatcagaactagaactattgcaattaaattaggagaagactttttcccaatttggggaaatattgtcaatatggtctttccgccaatctaatatccgaagaatataccgctaacctctccagcagttagatcttctaatatttagacgagaggtatatcgcttgaatatataaatagtatgacaattaccaatatctttctatagcaatatattgtttgtaatcatctataaactctttatttttgtaatataaagccccttttctgttaaatagactatataattcatcattaataactatttcctcattttcagagtcgagtgcagcagtgaagctgtctcgtattttggttattgaaccactattatttttaattcctattggtgcatgtgatatatgaattaagttacccttaccccaataaatggcatcttctaatgaaacgacttttctaaagagtggtacattattgattgaaggtattttttgtgaaaacagagcttcttctaatacaccttctttatcataaatatcataaaaatcaataggtcttgaatattgactgcattttgcttctttattatcacttataagtattctagcatatacattgttgctataattttttccaaaagcgacagcaattatgtatagatctatattgattttatcataaacctttttcatcttaaggtgtattattaatgcctttttgttattggagtaaattcaaatatgcctataagtatggctttattatattaatatttgaattctccaaattcagaacggataatcagttccttgtggtcgctttcttcgatgcgtccgataatctgtgcgtcgatgttgaacgacttgctgatttcaattacttgttccgcatgttccggtgacaggtaaacttccaggcggtgtcccatgttgaataccttgtacatttcgtcccattcggtgccgctttgttctttaattgtacggaacaaaggaggaacagggaagaggttgtctttgatgacacggcaattgtcgcctacgaagtgcagcacttttgtctgtgcaccacctgagcagtgaaccataccgtggatttccggacgcagggcatccagcaatttcttaaccaccggtgcataagtacgtgtcggagaaagaaccagcttgccggcatccagtggagagccttctacggcatccgtcagtttcagtttaccgctatagaccaattcttcaggtacagccttgtcgtagctttccggatatttttcagccaggtatttgctgaacacatcatgacgggcactggtcagaccgttgcttcccataccaccgttgtattctttttcataagtagcctgaccataagaagccagaccgacgattacgtcacccggacggatattggcattgtcgatgacatcggcacgtttcatacggcaagttaccgtactgtctacaataatcgtacgaaccaggtcgcctacatcggcagtttctccacctgtggcatatacgccgacacccatttcgcgaagttcagccagcaactcatctgttccgttgatgatggcagaaatcacttctcccggtacaagcagcttgttacggccgatggtagaagatactaagatgttatctaccgctcctacgcacaacaagtcatcgatgttcataatcaatgcatcctgtgcgatacccttccatacagacaagtcgccggtttctttccagtacaaataagccagtgaagactttgttccggctccgtcggcatgcatgatgttgcagtactccgggttacctcctaaaatatcaggaatgattttacagaatgcttttgggaaaatacctttgtcaatgttcttgatagcgttatgtacatcttctttagatgcagatacgccgcgctgcatgtatcgttgattgctcatgagtatagtaagtttgtttgtttcaattgaatgtgcaaatttagtgattattccttttattaccatgcgtttcgggataaaatcagtacaccgttactcctgcaggggtaattgtgccgtcaggagctaacaggctgaatcggaaaaagccttttcccgttttctgaggaatgtctttctcaggctggactgtacgtagaatctccatgcctgtggcgtcactcacaatgagtatatatccgcttgggatagccggaaagcttccgtaataaatcacaggattgtctttagccggtatgtttaaagccagtggggtgctttcatatccaaaacggtttacggctgtaactgcccagtagatacctccctttgtggataaatccggctcaaatgtgtattgacagctgtccgtacgtgtaataatcaggttttgagtcttctctgtatctaccggataagtggcagatgcataaatccggtaatagattcctcccggcaaagatggggatgccttccagctcatttcgatattgtttccttttaataccaaagaaggagaagtcggctgagagggaggattgccttttgtccatcgcatgggaggcactactgccgggtatacgtaaaaatggttcgtcagttcgtccagtattcctttggtattctccagcatgaatttgttacggaaataagcctgtccatccaatccaattcttcgggagaaataaatctggcgtatgatttcatctactttccagttctgctctttagggtgaagaaaatagattcccagtccgggtactatccaacgttcattcttgttttctttccagtcgagtgcaaaagggtagaagtgatttccctggaaatacatcatggggaaaagcgcatcctgaataccatcattcagccatttttgtgcatcctgatatactgtgctgtatgcgttccagccaaaggatgaataacgccgtgtgtcgttgaacttcccgatgggggaactgctgactttcacccacggcttcagttgctttacctccgcgtaaattcgtgcgacaatgcgggtaatgttatcccgtctccattgcttgagctcctgctttttcccatatttccgataggtatctttgtccgggaacttttcgccctgctccggatagcggatataatccaagtggatgccgtcaatgtcatagcgacttgtaatttccttggctatccggctcaggtaatcggctgttcctggatttccagggtcaaggtaccagctcccgttgaactgcttgcatagtgccggttgtttttttactacacagttctttcccaacagcgttacttggcgcttgtttccgataggaatacacaccagccatgcatgaagttccagtcctcgtttgtggcattcttctatcgcaaattgcagtgggtcatatccggggttcttgccggtatgtcctgtaagactttctgcaaaggtctcaattgcagaagggtagataacgtctccccgaagacgggtttgaaaaagtacggtattgaaattggctgcctttaaggcatcaagttgccggatcagctcatttttctgtgcttcaattcccttggccgaattcgccttccgtgtgggccagtccattcctccaagagtggtcagccaggtggcgcgtatttcctctttaggctgagcttgtaaggaaagcaagctgcttataaatagaagaccgattaatagtatgcgcatatcttttaaatgtttgtgcaaatatacatataaattgcggatatgtagagaaataagataataagccggaagaagaggagaaagaatgagggcttgcggagtaaatttttcttgaaaacagtaacggtttgtttctttttattacttttgcgcgataataaaagataaattgatagatatgataacgtttactctcgcattggtattattggtggtgggatattgggtttatggaaagtacgtcaattccttgtttgctcctgattctacacgtaaaacgccggctttgacaatggccgacggggtggattttattccccttcccacatggaaaatttttatgattcagtttttgaacatagccggactcggacctattttcggagcgataatgggggcgcagtttggtacggcttcttatttgtggattgtgttcggtacgattttcgccggagccgtacacgattttttgtccggtaccttatcgttgcgtaacaatggagaaagtcttccggaaattatcggtcgttatttaggaagccggactaaaaaggtggcctgcgtgtttactgtcttgctgatgattctggtcggtgcggtatttgtttcaggacctgcagagctgctggctggtatgactccttctgcgctggatgtgtatttctggatggtcgtgatttttttgtattacattttggcgaccatgcttcctattgataaaatcatcggacgcatttatcctttatttgcctttgccttgttgtttatggctgtaggcattcttgttatgctgtatgtcaaaagtccggccttgtctgaaatgtgggagggatttggtaggaagtacgagaagaacccgattttcccaatgatgtttatctctattgcatgtggagccatcagcggttttcatgctacccagtcgcctttgatggcgcgttgcattacaaatgaaaagcactgccgtccgattttctatggagcgatggtaacagaaggaattgtggcacttatctgggctgctgcggcgacttatttctttcaggagaacggtattgtggataaagtgaccggagtggcttattccggagccaaggtcgctacagatatctcaaaagactggttgggggcattcggtggcattttggccatattgggaattgtggcagctcctattacgagtggtgataccgccttgcgttcggcacgtctgattgtggcagacttttttcatgtagatcagcgctctatcgctaaacgtctcttcatttgtatccccatattcttggttaccatcttgttgttggtgtacagctttggagatgcggaaggattcaagattatctggcgatattttgcctggtgtaatcagaccttgtctgtctttactttgtgggccattacggtctggctggtttgtgcacggaaaaactattgggtaaccttgattccggctctgtttatgacttgtgtttgtgccacctatattctcattgctcccgaagggctggccttgtcggccgaagtggcttatcctgccggattgtgttgtgcactggtggctgcggtctggtttgtatgctggttccgccggatacgttccttataaagaattgtttggctgttctatagattatgtataattttgcgggctgtaaaggtaaaagtaatttcaaatgaaaaaaagatgctttttaatgtgggtcatgatggccgcttcggcaggggtaatggctcagaaagaaggttttggttataaattttatggacaggtgcggaccgacttattctataacagccgttctaactcagaaactgtcgacggacttttttacatgtatcctaaggatgtagctcctgatgcggacggaaaggatttgaatgccaaaccggatggtaacttctatactttgtacaccagattgggagtgaatgtgaccggacctaccttgggaaaggcaaagacttcggcaaaggtggaagtcgatttccgtggttcgggtaccacttattctttgttccgtattcgtcacgtgtatttcaaccttgattggggaaaatcagccctgctggttggacaaacatggcatcctctgtatggagatgtagctcctgaaattctgaacttgaacatgggagcaccttatcagccgttcagccgtgcaccgcaggttcgctatcggtttacaaacaaaaatttcaagttgactgctgctgccatatggcagtcacaatatttgtcagtagggccttcttccaataaagcaggagaggttgctacggttaaaagtcagagctttatgaagaatggttgcttgcctgagttttatttaggcatggattacaatcgtcccggattgcttgctggggctggtgtgcatgtgtcttccatgtctcctcgtacagaatcgaaatacaatgacaatatatacaaggtaagcgaacgcgtgacaggagtttcagctgaggcgcatgtgaaatatgtgcaccgccgtttcttgctggcagccaagagcgtgttagggtcaaacctgacgcaaaccagtacaattggcgggtatggcattacgtgtaccgactctcgcacgggtgaacaggagtacactcctttgcgtgtatcgcatacttgggtaaatatgatgtatggaagcaagttccgtggcggagtgtttgccgggtatctcaaaaacttgggagcatcgaaaagtgtgactggagtattgggtacaggaacaaatatcgaccagttgaatacactgggagccgaactgacttacaatcgcccgaactggaagttcggagcagaatatacttggaccggcgcgtggtatggcgattataccgacaaggcacgggtgaccaacacccatctggtgaaaaataaccgcatcgtactgactgctttgttccagttttaatttgtatcaattataatgaaatagcgagaagatgcatcggtgagggatgccgcttctcgctatttttattattctgctttctgtttatatagtttatctaaatctatactgggtgcttctttgtgaagtaagatagtagcggatacctcgttagcctgaaaattttccacatttgataaccgattgataaactgacgtactgtatctacttttacattttcaacaaatacattacggattggtaatcgggcatctccttttagctcgtaaatggcatcagccgactggcaatgaatgttctttacatgtattccatctatacgggtgatacgtgtttcataagttggaactaaatctttccattggtataatacttcagtgtctacttcaaaggtacgaagcatgtctccagcttcgatgtcttccaggtaaatgttttcgataaaccctccacgacgatggtttgtttttaagaaaaacaggcggtgtacattttgtggagctttacagcggatcatgtagatattgcgtactcctccggagatttcacttccgattccgagcagggtatgtccattgagaatatcacaatcccggacgacgatattttcactgggtgtgttgaggcgccatgcatcttggttacgtccggatttgatgaccaccgcatcgtctccctggtcgaacttacagttctcaatcagaaagttccggctcatttccaaatcgattccgtcattgttgtgcccatgagcctgcacatcgaggtggcgtactacgccactgttacacaaatagagatggatggtccaaaaaggactttggcggatatggaaattttctaataatatatttttgcagcggttaaaatgaatgaggtgtggacgaagatgattttctcctcttgccatttggcgttgttctacaggaacatctgttgaccccatggaatacaattgtcttaatgcgtttaagtgagcttccggacgtttaaaccacgtacgccaggtgcccatgactggagccagtgttccttttccggagatacctacattctcacattcaaatgcatagataagtggcgagtaattatagcattccagcccctcccaggaggtcattacagctggaaggtaatcattgggattgtcagagaatctgactacagctccttcttccaaaaaaaggttgacatggcttttgaggtgaataggtccggtaaaccactcaccggctgggactaccactcgtccgcctcccgcacggtggcatgcttcaatggctttggcaaatgcctgggtgtttagatgattgcttcccttttgggctccatattttgtgatggagaattctttattggggaatgtgcacaagtgtacggaatccatagggaaaggagcttccacatgtacaggttgtacgttcactttttgtgctgaagttgtatacgccatcaggctggcaacaaaaatagaaaataatgttttgcttctcatggtaatgtattagttagtatgccttttgtggcaaaggaaagcattcttttggaaataaatcaggtgtgaatgtccttataaatgtatttttgtacgatattctatgattccgtacgtttgtctgcatcctttttggccataagcgtttaattttgcctttacaataacctaagatgaaaatgtatgaaaataaagcgatttctgaatattggtcttgccggtctgtttttggcaaatgtggcttatgcacaaagttatcagtttgattttagtgagaagaaaaaagtcgagaaaggagtgattcaaatctcttcagattcaatatatccttgtaaaggtgggtatggatatgatttcctgcctgcaccggtgaagaaaagtaacgaaccttttttcttttcggtagatgttcctgatggaaattatctggtgacagttactttaggtaatgcccggaaagctggttctactacagtgcgtgcagaatccagacgtttgttccttgaaaatatatctactcggaaaggagagtttctaacttatcgttttacggtgaataagcgtaatacgataataagtgatggggaaaaagtacagattaaggagcgggaaaagaataaattgaactgggatgataagttgacatttgagtttaatggagatgctccttgtctggctagtctgaaaattgaaccggtaaatgatgtggtgaccgtttttttagcaggtaactctactgtagtagaccaggataatgagccatgggctagctggggacagatgattccgcgcttttttgatgaacatgtatgttttgcaaactatgcagaaagtggtgaacgtgccgatacctttattaaggctggtcgcctgaagaaggctttaactcagatgaaagaaggggattatatgtttatcgagtttgggcataatgaccagaaattaaaaggaccgggcaagggagcctattattcatttgccagcaatttgaaatattttgtagatgtagtacgtgcaaaaggggggattccggtttttgtgactcctacccaacgtcgttcatttgacaattctggtaaaatacaggaaacacacgaagactatcctgatgcgatgcgttgggttgcccagcgtgagggagtgcaggtgatagaattgcatgacatgacccgtgtgttttatgaagctatgggagtagaaccttctaaaaaagcttttgtgcattatccggcaggaacttatcccaatcagacgaaggctttggctgataatacccatttcaatccatacggagcgtatgaaattgctaaatgtgtgattgaaggtattaagcagttgaatcttccctgggttaaatatttgagagatgattatcatccttttaatcctgcgagtccagataaagtagatacattcaagtggaatgaaagtcctttcacggagattgagaaacctgatggaaattgatttttgtaagttatagagtcttataagttttaataggtaggataagctatttgaggtaaaagggagaaagagcggactaaatgatcaatagttcgttctttttttatttgtcaatagatttatgtacaaaagcacatgattgtgtacaatattccatgcgagagtaatctctttctgctatctttggaatttgaaaataagtaaatatgtatatgaaaaaacacataatgtggggagtctggttgctaggggcaacctgcttttctttttctgcttatgcgcaaaacaaggtgaaagcgccaatggaagatgttaaccaggtagtcgatttgacactggatagcttgaataaagcaaaaacagccagaccggttgcggggtctacccgtaaggggaataatcctgtacttttcttggtaggaaattcaacgatgcgcaccggaacgttaggcaatggaaataacggacagtggggatggggatatttcttccatgaatattttgatgaaaataagattacagttgaaaaccatgcgttgggtggaaccagtagccgtacattttatactcatttgtggaaagatgtcctgaaaggagtaaagaaaggtgactgggttattatcgaattgggacataacgataacggaccgtatgatagcggccgggcacgtgcgtctattcctggcattggtaaagacagtctcgaagtaacaattaaggagacaggagttaaggaaacagtgtatacttatggcgaatatatgcgtcgttatattcgtgaagtcaaggccaaaggagctcatccaattcttttttctcttactccgcgcaatgcttgggaggataaggacagtaccataataactcgtgtaaataagacttttggtttgtgggccaagcaagtggctaaaaaagaacatgtaccttttattgaccttaatgagataacggctcgtaaatttgagacttttggcaaggaaaaggtaaaatatatgttctatttggatcgtatccataccagtgtgtttggagcacgggtaaatgctgaatctgccgccgaaggtattcgtgaatataaaaaactggaacttgcccgttatttgaagcctgtcgaacaagatacggtcactggttcaaccagaaagaaaggctgtccggtgttatttaccataggtgacagtacggtgcgtaatcaggataaagacgagaatggtcagtggggatggggaagtgtgattgccgaactgtttgacttaaatagaatttctgtagagaattgtgctaaagcaggccgtagtgcccgtacttatttggaggaaggccgctgggataaggtctatgatgccttgcaacctggtgattttgtattgattcaatttgggcataacgacgctggagctattaatacaggaaaggcgcgtgctgaacttccaggggctggagaagaaagtaaagtctttttaatggaagccactaaaacttatgatgtggtgtatacatttggctggtatttgcgtaaatttatccgcgatgctcaggaaaaaggggctatccctattgtgttgagtcatacgccacgtaatatgtgggataataatgagatacaacgtaataccacatcttttggtaaatggacacgggaagctgctgaagcaacaggtgcgtattttattgacttgaataagttgtcagcagataaattgcaacagattggttatgagcaaggtctgaaatacgtagctccttatttctgtaaggatcatacacatacatcattgaaaggagcgcacttgaatgcacaaagcattgcagacggtttgaaagaaacagattgtacattgaaaaactatttaaaataattggaggtactatgaaacgtgaagcttttaaaatgttcctgaaaccaggatttgaaaaagagtatgaaaaacgccatgctgctatttggccggaactgaaacagatgttgtcagaaaatggcgtgtatgattattctatctattgggataaagatactaatatcttgtttgcctgtcagaaaacgaaaggtgaagaatcttctcaggatatgggaaataacccgattgtacagaaatggtgggattatatggctgacattatggaggtgaatcctgacaattctccggttactattcctttgccggaagttttccacatggattaaacaggcaattctgtacaagattgaaaaaagtgcatggcttttttagtgatgcacttttttatatttttgcaaatagtatataaaaacaaagcagaatgaacaggctattcttcttcatattcttttttattgtattgttggtagaaggagttgaggctgcagtggatgtgcgttccactcgctttacaaccacatccgggttaggcaataattcggtcagatatatgtatcaagacagtaagggattcatttggatgggaactcttaacgggcttagtcgttttgatggaacttcttttattacattccgtcctcgaaaaggaaataaaccttcattgccagatcatcgtatacaggaaattatagaggaccagaattgttttttatggataaaaacaacaggagagtcagtcgggtgttacgacttgaagaaggactgctttgtagattttacaggtagtggtgaatatttacgccattattcgaatgtctattttgtcaataaaaatgaagcttgggtaacaggagaaagagaaggatgccggttgatacgctaccggaaagaccgtacttttacttcaattgccttcgatgttcgtagtgggcttgcgtccaaccttatccgtgatttgaaggtaggtgcagaaggttgggcctggattgctacaggaaaaggactttattattgggatggaaagaaacttcatgcagtggatgagcgtatggattttatgagaatagctgttcatgggaagaagacctatttcctgacgaataaaggggctgtgtatactttcctgaatggggctttaaagaaggaagtttctattgaaggagattttacttactatgataatttgatattaggtaagaagtgggttatttttagtggtaccaatacctggagctttgactttgaaacgcatgtactgactttagctgaagaagcactgcaaataaaaagagcgaaggttattaaagataacaagggagaatcgtgggtttatggaaacagtggagtattaacttggattgattcccaatcgggaaaagtgactccttttttattgatgccggaagagaagcgtaattatgtggaccgggaacgctattatgtggtacatgattcacgtggaattatttggattggtacttatggtaacggtctttttgtatatgatgtggcaaacggacaaatgaaacatatcgtagccgactcagacaatgcgcaaagtcagattggttcagattttttgcaatgtgtcatagaagactattctggaaatatatgggtaagttcggaatatacgggagtgtcccgtttggaagtcctgaatgaaggtacacttcgtattttcccggcaggtgaagggaagtttaatcgttcgaatacggtacgtaccctgcaccgttgttcttcaggaaatatcattcttggaacccgtgatggaagaatgtatgaatacgattcacagttgaataataaaaaggaagaaacaacttatggaagtaatatttatgcggttgtagaggatgcagatggagttcagtggtatgcttcgcgtaccaagggactgattgtgggtaaccgtgtatatacacataatccttccgattcatcttcattgggatcgaatcaagtattttgtctgttgaaggatagtaaaaaccgtatatgggttggaacttttgaaggaggacttgatttggccgttccaggtaagaatggctatactttccgtcatttcttgacttccacttatggacagcgtcaggtgcgggttatttttgaagatgacaatcattgggtttgggttggaaccagtgaaggcgtttatgtgtttcagcctgataaactgttgaaagatccgtctgcatattatagttataccttcgataacggaatgttgagaagtaatgagattcgtagcatcgcttctgatgggaaagggcacatcctgatagcagagtcgggagccggattttcggtgtgctctcttcctgaaaatggaaattatgctcagctgaagtttgaacattttggattagaggatggattggttaacggaatggtacaaactttcattccagatatgaatggtaaaatctggattaccacagaattcggtgtttcttgctttgatgcggcccgtaaaacattcgaaaactatttcttttctacaaatatgctgggcaatgtgtatgccgagaattgtggactaagtttggatgacggccgtattgcttttggtacaaattatggattgacggtgattgatccgcgtagggtaaaacatccggaaagtaaaacgaaagttacgtttacagatttgcggttgaatggcatttcggttagtccagatgaaccggattctcctttggatatgtctttagcctatgcttcagaggtgaatttacagtattatcaaagttcttttgtggtagaattttctactttcgactactcgggagcaggaggttctaagttcagttataagcttgaaaactatgataagggatggagtgttccttcgtccttgaattttgcggcttataaaaatctttctccaggaacctattatcttcatgtaaaagcttctgatgcttccggattatggggagcggaggagtctgtattgaagattgtggtgaatcctcctttctggaaaacgccatgggcttatatcttgtatgtgatagtgatagctgtactgttgtacattgtattccgtattatacgtaatatgaatactttacgtaacaagattaaggtagaggagcagcttaccgagtataaactggtattctttactaatatttcacatgagttccgtactccgttgacgttgatacaaggtgcgttggagaagattcaccgcttgaaagtgccgaaagaaatggcttactctcttaagattatggacaagagtacggaacgtatgctgcgtctgattaatcaattgcttgaattccgtaaaatgcagaataataagctggcattgtcattggaagaaacagatgtgatagctttcctgtatgaaatttatttgagcttcaaggatgcggcagaatcaaagaacatggaattccgttttattccttcttgtcagtcgtaccggatgttcattgataagggaaacgtggataaagtagtgtataatattttgtctaatgcctttaaatacactccgtcaaaaggaaagattgagtttgtggtgaatgtagacgaatcggctggaagactgaaaatgagtgtatctgatacgggtgtgggtattcccaaggaaaaacgtggcgaattgttcaagcggtttatgcaaagtaatttctctggtgacagtgtaggcgtggggctgcatctgacgcatgaactggtcaacgtgcataaaggaacaattacttatgaggagaatccgggaggaggctctatctttattgtgactttgccgacggacaagtccgtatatgaagaaaaagattttcttgtgccgaacaatgtgctgctgcgtgaggaggaaatggctgaaaagcatttggcggatgtggtattgaaggatgaagaagggctggatgaagttcttccagtaaatccgctgaataaatacaaggtcttgattgtagaggatgataatgatgtgcgtgaatttctgaaagaggagctgggagtatattttgaggttgtagcagaagctgatggagatgcaggattggagcgtgcgcgtaattatgatgcggatttgattatcagtgacgtggttatgccgggatgttcaggttttgaactgacacggaaattgaagactgattttaataccagtcatattccggtgattctgctgacggccatgacctcggtagataatcatgtgaaaggaatggagtgtggagctgatgcttacatcacgaaaccgtttagtccgaaactgttgttgacacgggcgtttaagttgatagagcagcgtgaaaaactaaaagagaaattctcacatgatcccaatcaggtgcgtccggctctttgttcctctgataaggataaattctttgtagagaagatggggcgcattatggaaacgcaactgggaaatcctcagtttaccgtagacgagtttgcttccatgatgggggtaggacgttctatcttttatcgtaaggtgcgaggtgtaacaagctattctccaaatgaatacatacgtattatgcgaatgaaaaaagcggcagaactgctttcttctccagaaaatctgacggtggctgaggtttcgtatcaggtaggtattaatgatccgttttattttagtaagtgctttaaacttcagtttggtgtgactccttccgtctatcagaaaggaggaagaggagaaaaggaaaaagaagcaaatgccgattctgaagtcaaagaagaataagctagaggttgaatcttctttgctatttggaatttgcaaaaattagaaataagcggccgataatgtaaatatttgatgaaaaatgtcggatattctgtaaagttcatgattaaaggcgtgtaaaagtaataaatattgaaattatatgaagaaaaagtattatctttgcacgaatacaaaaacatagaagatgggacatcatcaattagacagtttagacgaacaaattctgcgtatgatcgcaggcaatgcacgtattccttttttggaagtagcacgtgcttgtaatgtatcgggagccgctattcatcagcgaattcagaagttgacgaacctgggaattctgaagggttcagaatttatcattgatccggaaaagataggttatgaaacctgtgcttacatcggtttgtatttgaaggatccggaacagtttgacactgtaacggaagctttgaagtttattccggaggtagtggaatgtcattttacgacagggcagtatgacatgttcatcaagatttatgcaaagaacaatcatcacttgctggaaattatccacgataaacttcaaccgttgggcttgtcgcgctcggaaacaattatttctttccgtgaagctatcaagcgccagatgccgataatggatctggcgaatgatgaagattaaaatcgcgacgcttatttttgcgtacgttcgtaatccacgaaactataggagtagagatgcttttcgtctgtcggatggcattctctacttttttctttccatagctctggacttacttccgggaagaaagcatcggcgggtgcctgcttatcgtctacttccgtaagatacaggcggtcggccaatgggagtgcttccgtgtagagagtggctcccccgaggataaatacctcctcgtcttccttgcaggtatgcagggcatcggccagtgtgtgaaaacattccgcaccttcaaagtgcagttcctggcggctgagtaccacgtttcttcggttggggagagcgcctttcggaagagattcaaacgtgtggcgtcccataatgatagtatgtccggtggtcagtgccttgaagcgttttaagtcgtttggcagccagtagagcaacttgttctgatagcctattcctcttttctggttgatggctgcaatgatggatagtgtcatgtctgagggttttaatgtttatacagatacttttccggcaatgtgaggccaggggtcataattctctaactgaaaatcttcatagtggaagctgaaaatatctttcacgtccggattgattttcatggtaggcagggggcgcggggtacgggtgagctgcaggtctacctgttctaggtgattcaggtaaatatgggcatcaccgagggtatgaataaaatcacccgctttcaagccggtaacctgtgccatcatctgcagcagcagggcatacgatgcaatattaaaaggtacccctaagaaggtatcggcactgcgctggtacatttgcaggctgaggcggccgttggctacataaaactgaaagaatgcatgacacggcggaagattcatgttgttcaggtcgcccacgttccatgcactgacaatgatgcgtcgtgagtcgggattatgcttgatggtttccaccgcttccgaaatctggtcgatgaacttgccgtcataacctggccatgaacgccactggtaaccgtagatgtgtcctaaatcaccgttttcgtctgcccattcgttccagattctgaccccgttttcttgcaggtatttcacgttggtatctccttgtaagaaccagagcagttcatggatgatggatttcaagtgaagtttcttggtcgtgacaagcgggaagccctcttccaggttgaagcgcatctgatgtccgaacacgctgatggtgcccgttccggtacggtcttcttttcgtactccttccgtacggatgcggtgcaacaaatcgagatattgtttcatgattggatttttttgtttgtgcaaaggtagctaatttttttgtatttttgccgccgtaatcaattgctggaaacatgaatttaccttctgattttatcctccgtacgcgtgagttgctgggagatgcggagtttgctgctttgactgaagccttggaaaaagatacgcctgtcagtattcgtatgaataccgataaatgtggccttgttccgcaggaaagcacctctgtgccctggtgtcgcgaaggatattacctgtccggtcgtccgtcgtttacgtttgaccccttgtttcatgcgggctgctattatgtgcaggaagcttcgtccatgttcctggaacaggcgttacgtcagtatgtgcacgggcccgtcacgatgctcgatttgtgcgcggctccgggaggaaaatctaccttggcccgtagcatacttccggaaggcagcttgctggtggccaatgaggtgatgcgcaaccgttcgcaggtgctggctgagaatctgataaaatggggaaatccgggggtgattgtaaccaataatgatccggctgattttacagaattaggaccgctgttcgatgtgattctgacagatgtgccctgttcgggtgaaggaatgttccgcaaggatgaagtggccgtgcaggagtggagcatagagaatgtggacacctgctggcagcgtcagcgccgtattttacgggatatatggccttgcctgaagaccggaggactgctgatttatagcacgtgtacatataatcgggaggaaaatgaggacaatgtggcatggattgcacaggaattgggggcagagatacttcctttggagacgcagccggactggcacattacgggaaatctgaccggtacggagtttccggtttaccgtttcctgcctcataagactacgggtgaaggtctgtttatggcagtgctgcggaaaacagcggatgaacccgcggtgagtgtgcggacaaagaccggtggaaaggcttccaaaaaagggaaaggaggtaaggtggtcgcgcttcaagtgccaaaggagatgaaagcctgggtgcagggagccggagattatgtgtttgaagtcaatgacagtgaagcgatggcctttcctgctgcctataaagatacgtatgacctgctgaagagccagttgcgcatactgcatgccggaatttctttgggagaactgaagggaaaggactggcagccttcgcatgcgctggctatgagtaccgtttttgagagagattcgtttccgatggctgaactgacttactcacaggccattgcttatttgcggaaagaagcggtagtactttcaccggaagtgccgaaagggtatgtgacatttacttatcaaggtcaggtattaggatttgccaagaatatcggtaaccgggccaataacttgtacccgcaggagtggcgaatccgaagcggatatttgccggaaattattccggatttattcggataaaaaacgcctttacgtttacgctaaaacgcaagtacgttttacttgaaacgcaagtgcattttaatcaaaacgcaagtacgttttccttcaaacgcaagtgcgtttttcaggaggaatccaagcgttttgattaaaaaattgcaacttgctgatatgtagaatgttattctattttagtgtaaggggaattcctttataaaaatccagtattttggtacggaacaggtagtcgtacttagcttgtacacagtcggacaccgctttcatccagttggtccgtgcctcgttgtattccgtagcgtttgcttttccgtacatgtatttttctttcatcagcttgaaagaggcttctgctgcttcatctgctacctgactgctctggtatttgctttctgcattgacagcattgtagtaggcttgctggatttccttgtaaagtttctttttggtttcttccagttgccagtttaaggtagtctgttcaaggcgtgctgtgcgtacacggttgcgtgtactcagtcggttgaagatgggaatacttaacgagaggcctacatactggctgaaattatctttcaactgagagtggaagctcggattttctcttcccgatacattataatagcttgttcccagtccggctccgaagtttagttgcggataataggcactttgtgcaatgcggatgctgcgtgcagctccttccaggcggtattgtgcagccttgatggacggcttggtcagcaaggcctgactgtagatttcggcaggaggagtcagtgtaccgaacaactgctcaggctggatgtcgggagagacaatcctgaaattgtcgggagagggcagttccagcaattggcttaaatcgagcagagacagacggtagtcattctcggcctgcaccagtgacaactggtcttgtgccacgcgcgacttggcttcataccattccgcttcagatgcctttccattcttgaaataggcttccttttgtgccagcatttcctgacttaactctacctgctgtcgggctatcttgaccagttcttcgttgaacaacacctgcaagtacgcagaggctacctcaatgctgatgtcttctttggccttgttcaaatcttcggtggccgctttcaggttcagtttggagagcgcaatgttgttgggtatctgcataccggtgaacaagggtacgctcgtactcaggttgaggccggtgttctgtgtgttgatactctggtacgtattgttggcctgcaagcttcgtccgaagttgaaagagtgagaggcactaccgttcaggtcgggcagacggctccatttggcggtgttcagttccacttcgcttttgtcgcgtgcggcttcctgttgtttgacggtcaggttatgagcaatggcatagtcgatgcagcgagtcaagtcccatgcctcctgtgcttgtgtgccattggccaacagcatgctgatgctcagtgctgtcagtaatttggtattgattttcatggcttacatttcttttttaagtccgcgaatcgattcgttggctttcagcccgcttttaatctcgatgttcactccgtcgctgataccggtctgtacctgacggcgggtaaacttctgtgtcggtacgctgtctgtcagtacatatacgaaagtggagtcaccgctgaactcaatggcactttccggtacggtcagggcattgttggcccgctggagttcgatttccgcattggcactgtagccggagcggatggtgatgctgtcgggcaccgtgatggcagccttgatttcgaactggttggccccgttattttctacgcttttaggagagatgtattccagtacggcatcgaatttcatctcctgtaaggctcccaatgtgatttttacaggagttccttcgtgaatacgtcccacttctgtttcgtccacgttacctctgaagataaggtcgctcatatcggccacggtggcgatggtggtaccgtcgttgaatgtattgctcatgatgaccgagttacctaccttgatggggacatccagaatcagtccgtcaatcgtagaacgaatcagcgtgctgctgaaggaggcactgcttttggtgataccttctttcacgatttccaggttgtctttggcagcctggagttcttctctggcttgtttggctgctaatagagtcttttcgtactcctcgctgctcaccagtttgctctggtaaagcttctccatacgttccaggtcggtttctgcctgacggccgttgatttcagccaaacgtacacgactttcggcagagttgagcgagcctaattcggggattaccttgactttggcaatgatttctccttttttcaccgtttctccggcctccttgtagacttcggatatgataccggaaatctgcggcttgatttgcacctcatcgcgtggctcaatttttccggtagccacggtgatttgtgccaaatcggtggttttggtgtggagaatatcgtaggccgtatctttcggctgcgacttctgataaaggaatacaaatgtgccgataaagatgagcgcaatcagcaccagcgaaataatcttgatgtactttttcatatcaactttggttttttgtttgtcttgtggttttatttattcgtcgcgtatggcctcaatgggtttgatgctcatggcccggtaggcaggagccagtccggctaacagtcctaaaatcaggaggagagcacaagcaccgattgcctgccagaaactgatttgaaattcggtgggagaggtcggggtggaggtccccatttctgtcaggttcaacaggaagacggcaaaggaaatgccggccatacctgccaggatggtcagtaccatactctcagaaagaatctgcgacagaatgtcgttcgggcgtgccccgatggcacgacgtataccgatttcggtggttcgttccttaaccgtaaccatcatgatgttgcttacaccgatggctcctgccagcagggtgccgagaccgaccatccatcccaaaatccggatgccggaaaacaggttgtctaccatgctgaacatggcttcagcgttgactaaaataacggcctgcccgtcgtccggatgaatcaggtgtgcttttttgaccacttgctctacctttttctctacttcaccgatggagtatcctttgcgggccgtatagcagagcagctgcacgttctgtccgaagttgtagttctgctgcatggtggaaaacgggatgatgaccgacgtttcggactgtccttgtatggaaatgtttcctaccgccatgcttactccgattacccggtaatagatgccattgacttcaatgaactttccgcaagggtcttcccctcccggaaacaaggtctcgtaaatacgctttccaatcacacagactttccgctggtcgcgtatgtcaatgtcattgatgaaccgtccgaacacgatattcggttcttctattttctggtattccggataaagtcctttcagcgtacctgagattttattttcattataaatggcattgatgccccatttggccagtgtggcagtcacggtttccagttcgctgacctgttttctcacacgttccacatccttgttttccaagtcccagtatctgccttgctgaaaacctttgtaggccttgctcgtcttgtttgtgcctaaaaagccggaattggtggcaaagccttcaaactggcgcgaaagcatttgttgtagccctttggcacctcccatcagggaaatcagcatgaatattccccagaaaataccgaaggcagtcaggaagcttctggttttgttgcgggtgatagtgagaagaatctcttcccatgtatctaaatcaaatcgtctcatggtcagtctgctctaagtgcttcaatgggtcggattctggccgcttttcttgcagggaaaagtcctgccagcgtaccggcgataactaatgtcaaagtagcttctatggcaatggacaagtctactgtcgggttttcgaaaaaggtcatcgaaaagacacccatgtccatggtctgtttgcctgctacctgattcatgtattccgtcacggcaatgcctgccaccatgccgatgtagccgaagaaagtcgtgatagtcacactttcagagataatcagccagaggatggaagcgggtttagctcccagggcttttcggatgccgaattcgtgcgtgcgttcgcggacggtaatcagcatgatgttgctcactcctacgatgccgctgagcagggtaaagattccgattacccagatggcagtatgcaggatttgggtggccgtctgctgttgcaggtattgtgtaaagcggttccatatccagatggctccttcgtcggtaggcgagaattgtttcttcaaccctaaagcctgccggtattccgcctcaaattgttcgttggtagcttcatcggccagtcctttggttgtaaatgtgatgttgtctatgctgtcacccttctgatagatggtttgcagggtagtgaatggcacgagagcagaaggcgaaaaactgttctggtcggtatagatacctaccacctgatagggtacaccttgtgcgttcaggtatttcccgatgggagaagtgtgaggaaagaggttctttaccgttttttcatgcagtacgataatttttcgccgctcctccatgtcgcgtgcgttgacgaagcgtccctctttaatcttgatggcttcaagtgaaggataattgggaaaaactccgttgattccgatactgagggcttcttttccgtaagtaagaatgacatcacttttgctgacggtggcaccggtttggatgatgtggtcaggaaatgaagtggcggtgagttcgcggtcactctctttcaggtaaatgctacggccctctttcattcctttgtaaggttgtgaggtcatgcccgggtagattttcatggagttcataatcatgcctttcgactggttctcaaaggcatggatgagaccgtttccggctcccagtaatacaatcagcatgaagatgccccatgctacggaaaagccggtcagcagggtgcgcaacttattgcgcatgatggttccgtagatttcttgtattaattctgtcatggctggtgttttatttcatgaatccgtttttgccaaatggagatgcattgtggtcaatgttgtcttctatgcgctctatcagtccgtccttgatatggataatcttatcggtctggttggcgactccgctttcgtgggtgaccactacgatggtcagtccttctttctcgtgcagttcctttagaatctgcatgacttccaccgatgtcttactgtccaatgctccggtcggttcgtctgctaaaatgatttcaggctttgaaattaatgcgcgtgcaatggctacacgttgtttttgtccgcccgacatttcattcgggaggtggtgtgcccattcttttaatcctaatttatccaggtattccatggctaacaggttgcgctttttccggcttacaccttgataaaataagggaagggctacattctccatggcgttcttgaaagaaataaggttgaacgactggaagatgaagccaatcatacggttgcggtactcggcggccttgctttcgctcaggtcacgaatcagtacatcgttcaggtaatattctcctgaatcatagttgtctaatatgcctaagatgttcagaagggtagattttccggaaccggaagaacccatgatggaaacgaattctcctttattaatatggaggttgatacctttaagtacatgaaggggagtaccgttgtaataggtcttgtgaacgttttctaagtgtatcatttggtttgtgtgaatttattgatttatcaggtctcgcaaaaataagaaaagtgaaaagcttcgaaaaataatgcgttaaaaatttgctctgtttttactgattatttacttttgtccgtagataattaaccctaaatagagaaatgtcatgacaataaacatggaaaaaccttatgtggtaggtatggacattggcggaacaaacactgtatttggtgtagttgactcacgtggtaatgtgttggcttctgattctgtcaagacacagcaatatgaaaacattgacgactatgttgatgctgtatgtaagaaacttcttcctctgttgtcacagtttggtggagctgaaaaaataaaaggtatgggagtgggtgctcctaacggaaactattatagcggtactattgaatttgcacctaacttgccttggaaaggaatcattcctctggcttcaatgtttgaagaacgtctgggtattccgactgcactgactaacgatgccaatgcggctgctatcggagaaatgacttacggtgctgcacgtggtatgaaagattttatcatgattactttaggtaccggtgtaggtagtggtatcgtaatcaacggacagctggtttatggtcatgacggatttgccggtgaattgggtcatgtgatcgttgatcgtaacggtcgtgcatgtggatgcggtcgtaaaggatgtctggaaacttactgttctgctacaggtgtggctcgtactgcacgcgaattcttggtacagcgcacagaaccaagtttgctgagaaatgttccggcagatgaaattcaatcaaaagacgtatacgatgcagcagtgaagggtgacaagctggctcaggacatttttgaatttacaggtcgtattttgggacaggctttggctgatttcattgctttctcaagtcctgaagcgattgtattgttcggtggtctggctaagtctggtgattacatcatgaagccgattcagaaagctatcgatgaaaacatcctgaagatttatgctggaaaaacaaaattgttgctttctcagttgaaagatgcagatgcagctgtattaggtgcaagtgcattgggatgggaagtaaaagaaaactaatgtatttataagataaaaaatcagccccggcaatttgtcggggctgatttttttattcttatttttcgatggttattttgcagggttgttcaagggattttttccattcttgtgcgtaagagaaccatgtgtttgaatcagggaatccgaatgcttccttacgtgaagtaaacatggtgtagtaccggaaactcttttcttggggggcgctgacggtgtacaggaagttttccttgtctttagcttcctttctgatgtatttctttggaatataagtcgccagaccgactgtttcttttttgtatttgatggtgtcgcctacgggccagtcggttccccagctggcaaccagtccctcgtggtctgagtacatggtggcgctgtaaccgatattttgcacgcctgtgcagaaggtctctttatctaaaggctggtcaaacaatacgtctacttgtgcgtcacgatgtccggcatacagtgtgtagcggttaatcatattcagttcttttccctggtattcccaaccttttacttcagcgtcggcaatggtacgtaccggaccgctggcgatgaggcgttgtccgcggaaggccacaggcttaatgtcggtagcttgtgaaccgtcccatcctcttaatgttccggctccgcaactgcctcttaccagaatcacgtcatctccgaatcctttttgtaattgttcgtctgtaggatagaacatactttcttctatttccagacctttattgaactttccgtataaatcggttgtctgtttctcgttaaaatagatgcggtaggccaccagctcgctttcgaatgcaataccgtgatgttgcagaatagtgtaagtgtaactgtcgcccggagcgtatacagctgtgccatgagcatattcatttgatttggctgtgcggaacagcatttctgcaaacacacgggctggataggtcttgtttgtcttgacagaggaaagagtcagggtgaatactttcttggattgcgccggcaaattagtcacgaaagccagttcatcagctcttaaatcgaagtttaaatcgtccaactgtgaaggtatttcattgttcccttctttcacaacggccgatttaacggtgaatcctgtatttaaagaatgaatatcaatcactacaggttcgtcggttttagctgtattccaagggttttcaacaatcactttaatggtcttttctgccgtttgggcacaaagcatactcccgctgtaaatgaaagcgaggcaaagagtgggaaactttttcattgtaataatgtgtttatatataagattaatgtgattcacgtatgtttctttaagctattatcctcctgaacatgctgccttcacaggggacatgcaggaggataataaatctaattctaacctaaataatattatgaaaaaccttttttattcaggatgcaaaaataagctttctgtttgatatacgcttgcaatttttgattttatcagtgaaaaaactgagcataattttacgtgattgaatattttggccttataaatgtaaataatgtaaataaagtttgtatctttgccccaaatttataattgaaaataatatgagttataatttgctgaaaggaaaaagaggtattatttttggtgcactgaacgaacagtctatcgcttggaaagtggcagaaaaggctgtagaagaaggtgccgttatcacactctctaatacccctgtagcagtacgtatgggtgaggtctctgctttggcggaaaaattaaactgtgaagtgattccggctgacgctacctctgtagaagatttggaaaatgtctttaagcgttcaatggaggtattgggaggaaagattgactttgtacttcattctatcggtatgtctccaaatgttcgtaaaaaacgtacttacgacgatttggactatgacatgttgagtaaaacattggatatttcagccgtttcattccataaaatgattcaatctgccaagaagttggatgccatcaatgaatacggttctatcgtagctttgagttatgtagctgcacagcgtacattctatggttataatgatatggcagacgcaaaggctttgctggaatcaattgctcgtagcttcggttatatttacggacgtgaacaccatgtacgtatcaatactatctctcagtcaccgactatgactactgccggatcgggtgtgaaaggtatggacaagttgttcgactttgctaaccgtatgtctcctctgggcaatgcatcggctgatgaatgtgctgattactgtatcgtaatgttctctgacctgacccgtaaggtgactatgcagaacttgttccacgatggtggtttctctagcgtaggtatgagcttgagagctatggcaacttatgaaaaggggctggatgaatataaagatgccaatggcaatataatttacggataatattgaatgtatcggcttatttttatattactgagtataatcgtcttttctgcctgtcgttctgacaagcagaaagacgatttttcgttttcaggaataaagatagcccgatatgaccgcttgcagtatgaagcaactgtgcagaacagtttcttttccctgcaacggatgaatactgaattttcccaggagacgcgtctgctgatagaggaagtacttgatttgggttctgtggatatggtagacatgaacgaccgtttgtgtgcttatttctcagattccatattggtacatttaatggaagatgtgggagagaagtttaaggatgtaagcaatcttgaacagcatctgacacggggattcagcaacctgaaaaaagaaattcatgagttgccggttccgcagatttatacgcagatttctgccctgaatcagtctgtcgttgttggagacagtattttgggaatcagtctggacaagtatatggggagtgactatcctctctataaaaaatattattacgcaaaccagcgacgctcgatgtcgccggaatacatcgtgcctgattgctttaccttttatttgctgggacagtatcctttcttgtggcaggaaggtcatcgttctttgatggatattctgttgtatcgggggaaaatagcctgggttgtggaaactattcttgaaggaaatggaagtggcaaaacggctttgggctactccaaggaagaaataaaatggtgcgagcagcacgaaaaagaactttgggaggaaatccgtcagaaccattatatgaggactaccgatccaatgattattcgctcgtatgtatcttctaacacacggcttctgtttaacggtgaaaagactcctcctttcttgggaatatggctggggatgaaggctgtagagcgatatatgaagaagcatccggaaatgactctaaagagtttgttggaatgtacggattattctggaatgataaaagaattaaactgattgacttaaagattccttatggaagttgcattgtatttgttgcctgttactttaggtgatacggctatcgaaaaggttttaccctcttataatcgggagataattgtcaatataaagcattttatagtggaagatgtgcgctcggcacgtcgctttttgaaaaaggtggatgcggatatttgtattgatgagcttactttttatccgttgaacaagcatacttctccggaagctatatcgggttatcttgctccgcttgcagagggacactccatgggagttatttccgaggctggctgtccggctgtggccgatccgggagccgatgtggtagctattgcccagaagcggaattttaaggtggttcctctggtagggccttcttctattatcttgtcggtgatgggttcaggatttaacggacagagttttgcttttcatgggtatctaccgatagaaccggctgaccgcatgcgccgtttaaaagagttggaggcacgtgtctattccgagaaccagactcaattgtttatcgaaactccttatcgcaatcataagatgttggaagacatcttgaaaacttgtcgtccgcaaacgaaattgtgtattgcagccaatataacttgtgaaggagaatttattcagaccaaaaccgttaaggaatggaagggaaaattaccggaactgaataagattccttgtatcttcctgatttataagtagtattttatttgaactctttccatatctgggccaccatgtggagacggtcacattcaattcttagttcgttactgaacttttccggattttgtctgatgtcttcacaggtaaagaagtatccttccgagagtttgaattcatcttcatggctgacgggaagtatatataactgcacgaaagccggtgtactgccttgtgtacggtagctgaggatgagtcttggaaaaaacttcttcttatgtgtggtgtgagaagttgactgatgtttttttaccaggttctttgcgtgacgctggctttttcttaacggtccgtcaaataaagtcttgataggagcatcccagatcgttgtattttcagcatgcggggtaagatatattttcccgttgcagataggaacaatccgtatgatatgttgctcttgaggagattgtgtggcagcaatctgtattcctacgatgttaatgaccagacatattacgtaaataagtgtaggaatcaaatagatgattccaaagttattttcaggagaaaagggaattagcttgttgtacaggaaaaacagaataatcaaatggatactggaaaaaatcacgattatttttgcttccagtaggtaagaagaagtgaaattaagatgaaacttcttcaagaaattccgataaatttccggagccgtcacatggatgaaggcacatactaatagcatgaattccaatgaaggagtcaggctgttcttagggatgtaatcatatccggtgaatagtcttaaaaggaagcagacaccgattccaatagttccttgtaaaagaaagaaattaagtcctttcaggcgcaacacatcataaagcagtcccgcaatgctgatagcaagtcctgttcccaacatggcggtcgttgggaacagatgaatgcctatcagtgtgataatgataggaagcaatccaaatgatacaattttatctttgtatttgagcaatagattcatcgttgaaaagcatctgttgataaaattgcaacaaatggaaaaagaaaattgttcattgtctgcggagatgtttttcagcatggtaagaagaacggaccagcggaccgctttctacaatttcaaatcctttggtttcacctatttctttgaatttcttgaactggtctggatggatgtattctgctaccggatagtgcttggctgttggttgcaggtattgtccgatggtcagtatctggcaaccgttctgtagcaggtcgtccatcgtttcttctacttcttctatggtttctcccaaccccaccatgataccggatttggcctttagtccattttctgcaatctgacggataactttcaggctggtatcataatctgctacacttctgacctgtggactgagacggcggacggtttctaggttgtgtgaaagaatatcgggacgtgtttcaatgacctgttgcaataattcgctgtggccttgaaaatcgggaataagtgcctctatggtggtgtcaggacacaattttcggatggccatcagggtagcagcccagtgtgaggcacctaaatcctttaaatcatcccggtcgacagaggtgatgaccgcgtggtcaagcttcatgagttggatggactgggccactctgagcggttcttccggatccaatgggagaggtcttccggtttgtgtattgcagaacttgcaggaacgggtacagatggctcctccaatcatgaaggtggcggtgccttttccccagcactcacctaagttgggacagcgtccactgctgcagatggtatgaagcttatgagtatctacaatgcgtttggtttcagtatatcgggcattggtgccaatctggatttttagccaatcaggctttctgatgtgtgtcatagtggtaagataaaagaacaaagaaaaacagatgacaccagtttcttgtgactggtgtcatctgctacatgaaatattataggttctgcaggaagaaattagccactctgttcatcaggtggttgcgggtatttcctccgaagatactgtgattacggttggtgtaaatctgtgtatcaaactggatgtttgcctgtaccagtgcttcactgtactccatgaaattctgcaagtgtacgttgtcgtctgcacttccatgaatgagcagcagctttcctttcagcttggatgcccggctgatggcagaagaagcctggtaaccgtcaccgttttctttcggtgtgcgcatgaagcgttcggtatagactgagtcatagaatctccagtctgtcggagcggcaatggcaactccggccttgaatgcgcctgaaccttcgctcattgacatcaacgtgttgtatcctccatagctccagccccagataccaatacggcttccatctacgtaaggcagagtagagaggtatttagctgcttcagcctggtcggtagcttctttcacgccgatagaaaggtaagtgcatttttcgaatgctgctcctctacctccagtaccacgtccgtccacgcagaccatgatatagcctttatcgcacattacagcttcgaacatacccccgtcactgaagcttccgataccccacttgtcgagtacttgctgagagccgggaccactatattggtgcatgattaccggatatttcttggaaggattgaagttggccggtttcatcatccaaccgttcagttctactccttcactggttttgaaagagaaaaactcttttgtcggcatgtttagctgagctgttttgcttttcagttctttgttgtcaagcagtgtaaccatttcctgacccttgttgttgttcagcgtaataagggtaggagtctgcgcgctggaatacgtgttgatgtaataattcagatttttgctgaataacgcactgtttgttccggtacgtgtagaaagtttggtctttttaccttttccgtcaatcttgtacaccgcagtgcgcaaggggcttccttcgttgctggtgtaatagaaaacatttgctttctggtcccatcccaggaaatcttttacctcaaattctccttttgtgatttgtttcaccaggtttcctccaatggtgtacagataaaggtggttgtatccgtcacgttcactcatcatgacgatgtgttccggatagaatgcaatgtctgaataggcttgctctttaatgtactgctctgcttcgtcgcggatggctactttgcagatggcactgcgtgggttggccatataaaggtcgaagcggttctggtggcgattcaatgtcatgatggccagcttttccggatcatctgtgaatttgatgcgaggtacataaccgtcagaatctacaggaagttccattttacgggttacacgactttttatgtcaaaagaatgtacgctaaccttggagtttacaactcctgctttgggatatttgtagtcatagcttcccggataggtggtgtactctgttttttctggagccatacccttataccatgggaaagagtacatgggaacctggctttcatcgaagcggacgtatgcaatcattttactatctgcactgaaatcgaaggcgcggttatagctgaattcttcttcatatacccagtcgggaataccgttgagcaccttgttatattctccgtctttcgttacctgcgattcgctgttaccgaaaagcagtttgataaggtagatgttgttgttgcgcacaaacgcaatctggtgactgtcgggtgagaacaaaggaacctgctgcggaccgttgtttgacaaaggttcaagtgtacggtttctcacattgtatatataatatacagctgtgaatgaacgacggtagatcggtttggtctccgtttgaatcaatatcagactttcgtccggtgacataatatagtcatcgaaatttttcaacttgtggttgcgggcagtggctacgtcaaagatggtagctacctctttaccggtcttaaaagagtatttgacgattcgtttgtggtccttgctgatctgggtgtaatgttcaccgtccagcatcggttttaatccctgtatactttgtgcgcgataggtaccgttggctacatcctgtagtgttaccttttgtgcctgcagagtaaccaggcacattagcgcataaaaaagtacaaaaagttttttcatgactgtgttatttaagttttacatttattcttctttttgaatagctccttcaggtacgacttctgatgttttctcttccttggactctgcgggcgtattttccttgtctttgatgccgaatagccagcggaagaaacggactaagaagttccgttttttcggtttgacttctgtggcttcagaagtagacaacggggcaactgtctctttttgtacgcttgtactgtcggtagagaccactaaggttgtatctgtggccaatgtatctgtcatcagtgagtctacggatggcatagggataacctgaagaactgaatcctccgcaagagagtctgctggagcagaaggtaccgaaagactgtctttctttatgtcaggagtggatttcggggcaacaggaggagtcggtttcggtttcttgaaaggaaccggaacagaatatttacagcgtacgttaatcccatgttcctgagccggaatccagtcgggcatcactatgatggcatctaaagcggccgtatccagacgtgcgtccagccctcttacgatgctgggagaagtgatactaccgtctttctctacaatgaattgaatcatgaccgccccctctttctgagtttcttcagccagttccgtggtatgcgcctttcttctgatatagttgaagaaggctttcatgcctccaggatactccggcattttctctactacgtgatacacccggtcggctcctttctttgtcattcgtatttccagcggctggttagggttctgcaagaaagattcgatgtcgagatacttgttttccatgcgttctgcccgtatcataatcaggtgactgtaatccgcttcaatactgaattcaccctgcgcattagagaatgtgtgtttcccagttccctggatgctgatttctgcatgaggaacaggtttacctccttctttcagcacgccatttaccagtaaagtcttaccgctttgcttgaagcgtgccaaatcctccggacggtctatgcggatgattgtatcttgtgctgcttcgtccagtcgcaaggatttgatagttctgttcttatctgtcgggaagtaaaaattggcagtacgaacgtaattgttgtcaatggattgttcgaaatcgatgagaccttgttcgttactgatatactcgctgctgtagcctgccactttcagaatgataccttgttgtggttctcctccggtattcagtacggtaattcggaaacgctgtttcttgttttccaatggagaagcccccacctgaggtaatgtaatcaggcaacatatcagcccggcgaatatataaataagatgtttcataagctcgtttataaatattcgcaaagctacgagtattctggggtattcactcttgttcaggtgttaataaagataaattatccggcctggtaaaatttacgaagccggataattgaactaaagtttggttatttggatgtcttggcaaccagttttcgtagcctgaacatgcgtaggcgttccatggcatgtcggcggctcaatatgatttgtcgccggtagacaatgcaggttgtgaagaaatatacgatagcctgtatccaaagtgcctgatattcgactaacacttccggaagagttgcgcccatgttattgattcttacaaacccgttgataccgaacgtagatgggaatatccaggagaatactttccagaacgtaggtacggcagctcccggccaggagattccggagataaacaggagcggcacggaggtgaagacataaatcatcagacacgattctctgtgatgtataaagatggagcaggtcatcgcaaagaaaatacatgccaagatgtaaggcaccacaaaagccagcaaggtcataggttgtgcaatttgtaccaaatcaaatagttgcggtacaaggcagagcacatacgcagccactaatgcataaatcaggaaataggccaatgactttccgcctacaatgcggagcgtaccctgatactgccggctgatggggaccaagtctttgaagcggttattctcacgggcggttcctgctgaaagtccgatgcctaacaatagcgtctgctgtataatcaggatgagcacagctggaatcaggaagctggcaaatccgtcttgcgggttgaatagcgatatatcttcgtattcaattggagccgtactgatctcatcctgccgttccgttgtatttcccattcgctgtatctgaatttttttatttaaggtaagtgaagcgttggtacttgccaatactagtgctttgtagtatagcataccactcatgtcacaataaatactgactgtagtttgttttccggaggaaatgtctttactgaagctttccggaatgtagagaatgccatatacccttgtttctttcagtaggtttttcccttcttccatatccgcacaatgcgactggatatgcacatcggcgcttgcatcaaccgtacggataaactggcggctgagtgccgtgttgctgttgtcaatcaccgctacaggcacttctcgtaccacctcattggtataaataaaggcatataccagcgggtaggccagcgggacaagcaagaagaaaataagtacgccctggtctttgaaaacggctttcagttcctgcttgcatatatggaagagacctgcaaagccttgttgtatggtttgttttaacgattcttttttcatgaacgcaaagggttaagggatatagacataatgcagcatggccgtgcgtattcttttcaggaagaagaaaggcaggagcatgaacagcagcagggcggtaacggcatgccaggcataaatgaccggataaccgtttaaggccagattcacgtagagcaggaaataatgccgcaaggggaacaatacggataaagcctgcagtgtagggtgcatcgccatgaccgggaaagtgaatcccgagatggagaatgaaatgactccccacagagaagccgcactcaatgccagacggagtgaaccgaacaaaccgaaaaggaatacaccgaatgcctgtgaggcaagcaccagcagcagtccggctagcagcatcgggaaaatcccgctatgacacggatagtgcaggaatccgtacaagtacacattatagaacgtggccatgatgaagaacgtcacggtttgaggaatcaatttccccaccagtgccgtcacaatggagttatcggccagttgcatcaattcttttgaagtcttttcctttaattctgttccgatggtatatacggtagtcaggaaaatgagcagcatcagaatgcccggaaacaaggtattacacaggtacaccgagtagttcagccaggggttgttcagtgcatgggtagaaatgactaccggttgcaggaaggcaagtgcctgatcttcagtagctcctttggctaataaggttgcttgtcctacggctgcagaggctaactccgacatggttctttggtccttatagagcaaggaacctgcaatcaggtaagaatagttaacatagaaggacactttcggctgtctgctggcaagggcttcttcggtcgttcctttcggaatgtaatagaatgaataaatctctccgcgctgtacggcctgtcttgcttctgtgacacttgggtaatgcgctacaatctgggtctgctgaaacgcgtccaggttgcggataatgttgcgtgtcgtggcggtgttgtcgaggtccaccactcctgcaggcaaattggtcggcagcccgttttccatcagggtggtgaaaaacaggaaacagaacaatggagcgatgaccatgcagaacaggtacatcggcttggtggcaatgcggagaatttctcttcgcatcactttcaggtaacattgataggtggttgtcgacatgtggatttatttttcaatgatagcagacatacccggacgtaaattttctacaggctgtacgggttttgcctttacttcaaaagtcttcaggtcaaactgaccggtggtcttggtggctttccatgcggcatacgtacctaagtccttcatgactgtcacctggaattcagcttctttttccagggcaggaacgtaggctttaatcttgcttcctacggtgaaatctttcagaaaatcctcacgtacgttgaatgtcacccacatgtcatccagttgggctacgttcatgatgggagctcctgtaccaaccagttcacctactttcgggaagatttcggccacttctccatcagcagcagctactaagtaagtttccgatacgtaagaagaaacctcagctacagctcctttggcgcgttctacctgtgcggcagccatggccttgtcttcgcgctgtgcaccattcttggccattgtgtactgtgcattggcagcacgttcggtcgccttcatggcatcgtattgtgcttttgcttcatctcttttctgtgcggtcatcaccccttcttcgtacaggcggttcacacggttgtatgatttttcggcaatctccagtcctgctttggctttctgccacatttcgtatgcagcctgcagttgctcgcttcttgtacctctcagggccttctcgttcagtgcttgtgcagcctgttcggcagcttgtgcctgcgacaatttagccattacatccggagcctccagaatagccagtgtatcacccgctttcactttatctccttcgctgacaaagaatttcaggatacgtcccggtaccttgctcgataccctgtattctgtggcttcagcctggccttgtatgatttcaggaccttttcctaaggtgaagaatccgatgatgctgacgataacgattacggctaacaatgtaaagaaagccagcatgatattgttgcgttgagtcttttccatatatctgtattattttaaaattcccattgatttgttcaaataaagttcactcattttgacgtctatctgtgcgtctatttttccggcttgtgccgagaaccaggccgtttgtgcttccagtacgttgctggtcggaatgactccttccttaaatcccaaattggcatagcgcaggttttcttctgctttctccatgttcttttcggctaaagctaatttcttggtcgattcgtttaccttataggagttctgcgtcacctggagttccactttttctttgatgtcttccagtttgtagcgggcgatgttcgcttctgcctttgcggcctttaccttatagataccttctccccagtggaatacagggatttttacgacgattccggcagcccacatgccgcggaatttattttcaaatccgttgacgagcgacgggttggtcaccagataattggcggtcaaagctacagaaggaagaaaatccgcgcggactacgtttactttctggcgatagatttccgatgccaattccagactcttcagctcttcacggttgctgagagccgtgcttacgttcgcctccgtgtaggtgttgggaaggggcaagtctttcatgctttcatcggccagttggaaatcggtttccaacggaagaccacagagctggcacaaaagcattttcgagaggttcaagccattatctacctgagtaagcatcatttcggcttcgttcaccttcactttgacacttaatccgtcggctttggtagccaccccttcttttatcatcttgtctacgtccgaatccagtttctgtaccagctctaaaaaattctctgccagttttttcttattgacgagtgaaatgatttgccagtaaatctggtccgtctgcaggataagatcttgcatacctgtggcatgctgtgattcagccagacgttctgcatatttggtaatcttgttgtaggcaatgatttttccacccataaagagaggctgggtgagggtcgcagctcccatcgtcatgtttcgggtatctgtacggaaggcatccaccagaccttgtcctacggcattcagtccatccgtaagtccggccacagcacccggcagcaatccttgcaatccggcagccagtccgggatttgccgcagcaagttgtttcatggcagcctggaattcagccgactgcataccttgttgcaactggttccctaagttggtacccatgttaccgatgctttgcttctgtgcatcactgagcagggatatttctttctgcgtacgcatatatccccctgtaagatcaattttaggcagataattagtgaatgcagccttcttctcatagtgggcggcattgactttttcctgtgaaattcgcagctctttgttgttggccagagcgagcgcccggcaactgtccagagtaagtacttgttgggcataactgctgagagttgcgccaagcagtaagagtaaacttgtaattcttttcattactgatgctgactttttatttggttgcttatgcaacattgcaaatgtatgacattagaacaaatagtcaaagcgttttgttgaaaagaatcagtaataaatttaatttttgctgagcgtgtgtcttaccggttacttttatctttttatccggttgtaatgaggcttccgtgcaatggggtcaaccagcaattgtacatgcttggaagtccggctgcggcttaaagtcgtagcatcttctgattcgtccggattggtaaccaccgggaaacttccgttttccattctatatagaaccggttgcataagctggtcttcagccgaaccaaaatctcctaattcagctccatagttttcttctatttcgaaatccggcaataatccgttcttgaaatagtcataatatccttgtgagttgctcaggtaagtagtagtgagccataattcaacgcctggagcttctgcattggtaaacagttgctgagccacattctttccgaaagtagctgctcctacctgatacaaacggccttccatatagggcttcaggcagttgatgacaatttcagaagcggaggcagtattacccgaagtgaggacatacaggttttgataagacagacttgctcctccggtcagcggactggattcgaagttcagtgtttccgttttattgattttgtcattgtaagtcatgtgcaggaaaggctgtcccattgccgtagcgggagccaaagccgagcaaagctgctgcgatgtatttacgtatcctcccgggttatagcgtaagtccaggattatatcgtcaaactgctgtccgttcagttgtgaaaacgcttctttgagtgcatcggcactttctccaaattcgttgtacagcaggtagaaagcttttcgtgaacccgaggagatgatgctgtatttaagtacatcttgttcttccacgtagcgaggttccggcatctggactactccaagcgtatcaaattccacgtagttgaattccgggtcgtccacctcttccggataaggattgtatttacctagtgtaaaactgtacgcttttgtcggtcgggtgatataagtggaataatcacttgtggatactttctggttgtctacggcaataatccagtcacctcgtttcagtccggcttcttctgctggcgaattaggctgtgtgtataatactctcagcgcatttgttcctccttcagtacgtaccaaagccgcttcaaaaccgaagcttggataagtgctggtggcacgtgaagttgtaagaacggagtctacatgagaaaacacatacccgtttttctggtctttggaggatgcggctgaagtaagaaactcagctggtttcttgaaaaagtccagtttctcttctgccggaatatcttcataaaaaagatagttttcctgcatcacctcgtaaatccatgtcttggtggcaatcagggcatagtattcccccgagcggtcttctccgcaggaagatagcaggcccattagtgcaagccaaccgtatatcaggtgactgatgtgctttttcatgttttctgaaaattatttcatgcggaatgaaccctgaccaatcatgctgccatcggcaaatatatacacgtggtatgtaccggccgccaagaattcttctacgtcccagtataccgtaaccgtctgttcttcacccgtgtattcaatgtatttcttgatagaatagctgatgttgcggtcttcaaacttgaactggttgctcggactcttggtcagtacttcgttgtccggtttggcaatacgtacataaagggtcttgttacccgtctgtgccgtaatgtttttcacgatggtgaatgaaattgcaatcttcttgatattctttacgcgttccgtatcgcgtcctcttttgttcagtgtctgtacccgaatgttggtggcatccagttgggcagccagtgatactttttcattcaggctctttgtttcttgtgacaagttggaaatctgtgcggtagcagcactatatttgctctttacttcctgattttcctgcatcaaggcagcattgattttgttcagggagtctatctgcattacgtagcttctcaatacggcacgtacggttttcaattcttttttcagtcgcatgatttcagctgcatcgctggttttcacctgacgcagttcctccagtaagcgttgggttttcagtttttcactttccagcttttcgcgcaaggagtcattatttatctgaatctgcaattcgtcatattgggtagcaaacgtgctgtattcattttccatctcttgtttttccaccgcaaagagctgactcatttctttgttcttgcgagcttcatttacggcaaagaaagatactgctgctacaatcacagccaatataatgatggtgatgataaattttttattgttcatggtttcaatttttgcatttggcgcaaaaatacaatatttatgaataccttctttttatttttagaaaaattatggggataccaggatggcaggtagcgtttctcctttttcccatagcaggaaggaggattcggggtatagtttggctccgctgtcgcgtacccattggttcagaatttgatacagattgtcttcggtaatgctttgctggctgccgtattgcatgattgaatcagagggagcacttacatagttgttacccaccggttctctggtgtctccataagggtaataacagcagcgtatatttgtgttttctgtttgcaggcagatagcatgattcttacttgtgtttcctttaagatagcagttcagaatttctccgtttttagtgatactgcagataagaccgcttctgtttttagctttactgaaattgcagttggtgactgcgcaattgatgattttcccaccttggttatatcgtgtgagggcgtttccttgtggaatctcattttttagtcttacgttatctacatggcaattgataatgattccttcgttccagtttgtcaggtttccgaaatcgctgtcatcccggatgatttcaacggtacagttttggagtatacaattgttgatttctcctcgatttataccagctagaaatgccgcatttttggtgtcattctctttattatacacggcttgtccgagaattaggttttttacagctccggtagcagatattccgctaaaaagaccggcataataacttccatccactgtttgttcgaaacgtagattattcaaactatgtcctttcccgtcaaatacgtcattgaataagccttttccggtgctatccccttttttgtactttccaatcatttgcacctgtgtggattcttcttcagtaaaggttaagtcgttcagcaggtagtaggtcgtggtttctccctttttttcaccaaactcttccaaactcttgttttcatagacttctccgttaattaaatgggtgaaggcaatgaagtcttctacagtagaaatgccaggattttcgccgtcttgttttatggaacaaatgtattcgtatccggatgaaaaagcatgttcttccagttgactttcataatcttctcctgcggcggtatagatctgtatgtgaatggacagagtggtaggtggaaccagaaaactatatattccatcttcattttgttccatttgcataggagaggctgtgtcttgataggacatttttccggaatcaggattaatcccggttacagataaagaaggggtaaattctatcagactaatttggttgttcagtttgctggatacattaaatacgatacgtgcaaacaagtgctgaaaagataaatgaatgttttctccgtagtttgtggtggctttggcatagagctggtcgcataagaaaccatcctggtaaaaggactggtgattccggtacaagggagggcagaaagaacaactgacagctggttgctgggaatcctcccattccggaagattctctccttcccagttgctgccgttgtaggaaagtagaaactcgtctgcatgaataccgccctggctgtaaaaggtcaatgtgcttcctgcaggcaggccttcgttgagtgtatttcgggaggtattgaaacgtgctacattttctccttgaatgattaatgtattttgtatggttttaataggctcttttgtacatccgattgccagcaatagaaaaagtatgttctgaaagatatgtctgttcataattctcattttgttatataaacgtaattctcctttttcgtttcccttttcaccgaaaaactttacctttgcacggatttaaaggaaacgtttcacgaaaatatgggaaaaggaaaattagcgaaattcgcagatatggcggaatatccgcatgtgtttgaatatccgtattcggtggtagatgacgtgccgttcgaaatgaaaggcaactggaaccgtgatttcttcaagaacgaccatccgattgtgcttgaattgggatgcggacgtggtgaatataccgtggggctggcacgccgctatccggaaaagaactttataggagtcgacatcaagggagcgcgtatgtggactggagcgaccgatgcattaaaagaaggattgacaaacgcagcctttttgcggacgaacattgaaatcatcgaccgtttctttgccccgggagaggtaagcgaaatctggctgactttctctgaccctcagatgaagaaggctaccaagcggttgacttccacttatttcatgaaccgttaccgccgtttcctggttccggacggactggtacacctgaagacggacagtaacttcatgtttacctatacgaagtacatgattgaagccaatcattttccggtggaatttatgactgacgacttgtaccattccggtatggacgatgacattctcagcatccgcacgtattacgaacagcagtggctggaccgcggactgaacatcaagtacatccagttccatttgccgcaggatggtgagttgcaggaaccggacgtggagattgaactggacgattaccggagctacaaccggagcaagcgtagcggattgaaaacaagcaaatgattcaaaactgaaaaagatatgacactttatccgaaattgattatggacgcactggctacggtgcgttatccgggtaacggaaaaaacattgtagaagcggagatggtggccgacaatcttcgcattgacggcatgaaggtgagtttctcgctcatttttgagaaaccgaccgacccgtttatgaaatcggtggtcaagtcggccgaaaccgctattcatacgtatgtatcgaaagaggtagaggtaacgattgctaccgaaagcaagcaggccgctcgtccggaaccgggcaagatgctgccgcaggtgaagaacgtgattgcggtatcttccggaaaaggaggggtaggaaagtctaccgtggcagccaatctggctgtggcattggctaaattgggctataaggtcggtctgttggatgccgatattttcggcccttcagtgccgaagatgttccaggtggaagatgcccgtccgtatgccgaagaagtgggcggacgcgatttgattgtaccggtagagaaatacggcatcaagttgctttctatcggtttctttgtagaccccgaccaggctacactctggcgtggaggtatggccagcaacgccctgaagcagttggtggcagatgccaactggggtgatttggactatttcgtgctggatacacctccgggcaccagcgacattcacctgaccttgttgcagacattggccattacgggagccgtgattgtcagcacgccgcagcaggtggcattggccgatgcgcgtaaaggtatcaatatgtataccaacgacaaggtaaacgtacctattctcggtctggtggaaaatatggcctggtttactccggcagaacttccggaaaacaaatattacctgtttggtaaggaaggaaccaagcgtctggcagaagagttgaatgtgccgttgctcggacagattcctatcgtgcagagcatctgcgagagtggcgatgcaggaacacctgctgccctcgacgaaaactctatgaccggtatggcctttatggagttggcacgcaacgtggtgacgcagacagaaaagcgtaatgcagaaatggctcctacggagatagtacatacgcattaatgtttaaaaatgtaaataagagcggtggcagaaaatgcgcaccgcttttttatgccctttccaggcattttcttgacgggttgacgggttgtcaccggtttttcaaactttctatatacaggtgtggaataagtatgacacacttgttccacaccccgcgtatatatactttataaaaatgcctgccaaccccgacaacccgtcaagatttgtcttttttcctccctggagggccgtttttcttgtctttcaaaacgcccttgtgttcaaatcaaaacgcacttgcgtttcaagtcaaacgtccttgcgtttcaagtcaaacgtccttgcgtttcaagtcaaacgcacttgcgttttagattgaacgcacttgcgttttttgcctgtgaatttgtttaaaagttcgaaatagttttcgggttggatttatatgtatgggttactctctacgtggggagtattttaaatataatcatctttaaattccagttccaactgaacaggtccggaactgacgtgctcattcataccattttcttctttcgggttggaaaccgacaagcctaacaggcggataggatgctgactgtagtccactcctttcagcagccgtttagccagtggaagaatgtcgtccaggcgttggagcggccgttccacactcacactgcgggtgatttgggagaagttgtcgaacttcaccttcagcgtgagggtattccctttaaaattcttggctttcagccggtcggtgagttcgtgtgccacgtgatacagttcgatgatgagtgacatttctgccgaaaggtctttttccaatgtatgttcgcagccgatagacttgcggatgcgtacagcttctaccggacggtcgtccataccacgggcaaagttgaaataaattaatccgtttttcccgaactgccgttgcagcatttccaacgagcatttacgcagggtctctccgttataaatacctaaggtatgcatctttttggccgtaatggggcccactccccagaaagcttcaataggcaaccggcggataaactcatcggcctggtcggggtgaatggtgcaaagtccgtcaggctttcggtaatcggaggcgattttagctaagaatttattgtaggatataccggctgaggccactaaatgaagttcctggcggatacgttgcttgatttctttggctatatctaccgccaatggaattcctttcttgttttccgtgacatccagaaacgcttcatccagcgaaataggctcgatgaggtcagtatagtcgtgaaagatttcatgtatctgtgcagacacgcttttgtaaacttccatccgcccctccacgaaaatcagttgcggacacagttttttcgctttttgtgaagacatggccgaacgtacgccaaatttacgggcttcatagctggcggcagctaccactcctcgtttctctgcatgccccacggcgatgggctttccgcgtagttccgggtggtcgcgctgttcgaccgacgcatagaaagcgtccatatcaatgtggataatttttcgttcggtgtgcatgaatgagtggatagcttttctgcaaaaaaacaaaacattcttgggaaatcctaaaaatcatttgtatttttgctgtttgtaaaattgttttgatgacttttttgacagcaaaaaataaagaaatatgatgaaagatgagattaagaaagcctgcgaggtattgcagaaggggggagtgattctttacccgacggataccgtgtggggaataggatgtgatgcgacgaatgaagaggcggtgaaacgcgtttttgaaataaagcagcgggctgacagcaaggcgatgctggtgctggtagacagtccggtgaaggtggatttttatgtacaggatgtgccttccgtagcatgggacttgattgaaatgactacgaaacctttgaccattatttacgatggagcgagaaatctggctccgaatctgattgcagccgacggcagtgtaggtattcgtgtcacctcggaggagttttccaaacaactttgtttccgcttccgcaaagccattgtatctacgtctgccaatatcagcggacagcctgcaccggccgtgttcagtgaaatcacggaagaaatcaagcaggcggtggattatgtggtggattaccgtcgggaagaaaccggtcaccccaaaccgtccagtattgtcaaattaggcaaagggggcgtggtaaaaattattagagaataaattttttctttcatgaaagttgtagacgagaagaacagcttgctccagggctttctccgttggagggagagacatataaaggacaagcagtttgtattgattttaagctttttagtgggaatctgcacggcgctggccgcttgtctgttgaagttcctggtagagtatatcaaggagttcctgacagaaaactttgattctacaggagtaaactggttgtacttggtgtatccggtggtaggtatcttcctgaccggactgttcattcgaaaagtggtgcgtgacgacatcagtcatggtgtgaccaaaattctgtatgccatttcgcgtaagcaaagccgtatcaagcggcataatgtatggtcttccgtttttgcttcggccattaccatcggttgtggtggatcggtcggtgccgaagcgccgattgtgctgaccggttctgccattggttcgaacttgggcagtattttccgtatggaccacaagacgctgatgctgctggtgggatgtggagcagccggggcggtttcgggtatctttaaggcaccgattgccggtgtggtctttacgctggaggtactgatgattgacctgaccatggcttctttgcttcccttgctgattaccagtgtgacggcagcttctgtttcttatctgctcacaggtacggaagccatgttccagtttcacctggattatccgttctctttggaacgtattccatacgccattgcattgggcattttctgcggactggtggcctggtattttacccgttccatgaactggattgagaatattttccgccgttatagtaatccgtatgtgaagttcctgattggaggagccatgctgagtatattgatttttctgttcccgccgttgtatggtgaaggttatgataccatttccctgttgctcaatggacggtcgaatgccgaatgggatacggtaatgaataactctcttttctacgggaactcgcagctgttggtggtgtatttgctgttgattatcttgtttaaggtcttcgcatcgagtgcgaccaacggtggtggcggttgcggtggtatttttgcaccgagcttgttcctgggatgtattgccggctttgtgttctcttatgtgtgcaatgagttccagttgggaggtacatacattccggaaaagaactttgccctgatgggaatggcgggactgatgtcgggcgtcatgcatgcccctttgaccggagtcttcctgatagccgagctgaccggtggatacggtttgttcctgccgctgatgattgtgtcggtctgcgcgtaccttactattatcgtgttcgagccgcacagtatctattccatgcgtttggcgaagagtggagaactgattacgcatcataaagataaggcggctttgaccatgatgagcatggaaactgtcattgaaacagatttccaggtggttcgtccggatatggatttggcggagatggtgaaggccatttcgaaatccggccgtaatctgttcccggtggtagatgtacgcaatgaattgattggattggtaatactgaacgacattcgcaatatcatgttccgtcaggaattgtatcacaaataccgggtagagaattttatggttacccctaaggcctgcattattacgacagattccatggaagacgtgatggataagtttgataagacgggctcctggaacttgccggtggtagacgaagacaacaagtacatcggttttgtatccaaatcgcgtatactttctacttatcgtcaggtgatggtggatttttcagcagaataaacaacgaaaagaaatatggagaagaaagatttacgaattgtatatatgggcactcctgaatttgccgtggagagtttgaagcggctggtggaaggaggctatcaggtggtgggagtcatcaccatgcccgacaagccgatgggacggcatggcagtgtgcttcagccgagcccggtgaaacagtatgccgtgtcgcaaggattgaaggtgcttcaaccagaaaagctgaaggatgagaatttcctggccgagctgagagacttgaaagcagatttgcagattgtggtcgctttccgtatgttgccggaggtggtatggaatatgccacgcttgggtacattcaatctgcatgcctctttgcttccgcagtatcgtggcgcagctcctatcaactgggcggtaatcaatggcgaaacagaaacaggtattaccactttcttcctgaagcatgagattgatacgggcgagattattgaccaggttcgtgtgcccattgcggatacggataatgtggagattgtgtacgacaagctgatgcacttagggggagacctggtggtgaagacagtggatgccattttggaaggaaatgtgaagaccattccacaggaacagttggctgctgctacggaacttcgtccggctcctaaaatctttaaggaaacctgtcgtatagactggcaggctggagtgaaaaaggtatacgattttgtacgtggtctttctccatatcctgctgcatggacggaattgcatcagggcgatgccgctccgctggcattgaagatttttgaaacagagaaagtctttgtcgcacataatctgaaacctggcagcattgtaaccgataagaaaacgtatttccagattgcttctaccgacgggtttgtcaaagtgttgtctttgcagctggcgggtaagaaacgaatggaggtagctgacttccttcgcgggtatcgccatgtggaagattctttcgtagagtaaaaaatttgcaatattatttcgtgagggtgacggtagagcatatcgtcgcctttttttgttaaaaacattttaatgaggatttttattaggaaaaggtgcagtatttttgtgcattcatcatttactaacaaaagcacgataggctgaatatgacagaagaagaattggcgtcgaaatgcaagctggcggataatcaggctcgcaaggagttgtacgagctgtatggcggttcgctgatggccatttgtcttcgttatataggagatcgggaggctgctgaggacgtgttgcatgatgggtttgtccggatatttcaatccatcggacagtttacttatcagggcgtcggttctttgaaggcatggctttcgcgtgtgatggtgaatgaggcgttggggtatttacggaagcgcaatcaattggcccagcaggaagtcttgatggagcagttgcctgatacggaagaggatgatgatggtgtgggagatattccgcaggcggagttgatgaagatgattgcggaacttccagatgggtatcgtacggtattcaacttatatgtgtttgaagataagagtcataaggagatagcccagctgctgggaataacagagcatacttcttcttctcagttttatcgggcaaagaccttattggcaaagaaaatcaatgaatatagaaagaaattataggcaatgaagagcgagaaagaatggattaataacttacgtaaccggatggagggttattccgagcctcttcctgaaggcctttgggacaagttgtccaaggagctggaagagccgaaaactccaaaggtgattccgatatggagacggtggcaggcagcagcggcagtgctggtcttgctggtgtcttccctgacgtactggttctggtcttctccagaagcggacttccgtaatcaggaactggcggtggaggtgaagaatacgcctttgccagcgcaaacttcttctttagatgaacaagtggctgaagtaaagcatgttgagcctttccagaaagaacctgtggctcttttggccaatgtttcttctaagaaatctgccggagaagtgccggaagaaatagtagaggtagcccctgcttcagttgcattggctgaacaggaggaaccgatagagtcggttgaagaaaaggagagtgcaagaccgcaagagctagaagaaactagtgctgctgaaagaagccggaaagtgaaagagagtcgcgcggctgaccgggaacagatggaacgtaatgccatggcactgaaaaataagtcggataaatcttcaggcttttctgtgggtgttggtgctggaaatacaccttatagctctttgaatacatttgatggaatgggaagttttgtagcccgttcggcttattatacttcctcagatttgaatatgtctccgataaataataacgggctggcttatagtcaggtgttgttggagaatgccatacaggctcctcagacaacggtaaagcatcatattcctgttacggtaggattgacggtagcctggcagtttcatgaagactgggcactggaaacgggattgaactatacgttgctaacttctgatattcgttccggttctaaatcttatgtagaggaaactcagaaattgcattatataggtattccgcttaaactgcatcgttccatctggaaaaataactggctttcagtgtatgcatcagctggaggagtaatggaaaaatgtgtatctggaaatttggaaactgtgacagtaacgaatggaggaaatcgtacgtctgaaaatacttcattagatgtagatccgcttcaatggtctgttaccgcagcagccggagcacaggtgaactttacttcacgttttggattgtatctggaaccgggaatcgcatattactttgatgaccacagtggcgtggagacgatacgaaaggaacatccgttcaattttaatctgcaactgggtttgcgctttaatgtgaccaaataagtttttatagttgatttatgagaaaagatgcttatctttgttgaaaagaatctgattaactaaaataaatcgatggaaaaaattatggtagctccttccttgctctctgcaaattttgctgatttgaagagtgacctggaaaaaataaatcaaagtgaggcagactggttgcatctggacattatggacggggtgtttgtacccaatatttcttttggctttcctgtattaaagtatgtggcggaacttagtcagaaaccgctggatgtacatctgatgattgtacagccggagaaattcattcaggaagtgaagaaattaggagccatgatgatgaatgtgcattatgaagcttgtcctcacttgcatcgcgtcattcagcagattaaggaagcgggtatgaaggcaggggttacgctgaatccggctacaccggtctccgtgttggaggatattatcacagaggtggatatggtgttgctcatgagtgtcaatccgggattcggtggtcagaaatttattcctaatacattaaaaaagattgagcaacttcgtgaaatgataacccgtaatggggcttctgctcttatcgaagtggacggaggtgtcaatccggaaaatgctcctttgctacaacgtgccggagcagatgtgctggtggccggtagttctgtttttaaggcgccggatatgataaaagctattcaggagttgaaatatgtggagtaagtattgggaaccttacattctttgatagcgtaccctttgttccggttgactatttgtctggcaaccggaatttttttattcgacacgtggtggccggaaaatctttcatggcaatatggggctgcgatatggctgctttttgtgggagtttgcggaggagtattctggttttcccgttggcggtggagatggcttttcggtggagtggccggaggggcttttttcttgtggggaggaatatcggtacttcatcaaagggaaacggtgcaatataattgggatggagatcccgctatatataaaggtatagtggaaagtgtgccggaagtcagagggaagacacttcgggcggaagtgcgtgtggagatgcagcggttgtcgggtgacaaatggaaaagggtagaccggaatatccttttgtcgtggatgccggactccctgtcaagtcctttagcttgtggtgacagcgtttgtttctatgcaaaagtttcacgtcctttttctgaaaaggaactgaccggatttgattatggggattatcttttgcgaaaaggtattagcggaacggctttggcctatgctggtaactggcgttgtacgggaaaacctcattcgttgtctttcatgcagcgggcaaaggtgtgtcagcaaaaggtggtagatgtatatcgaagttggaggttggaggaagatgtacaggctgtggtgtcggcattgacaatcggagagaaaagtgagttgactcctgaattgaaagcggtgtacagcgcggcaggtgccagtcacgtactggcgttgtcggggttgcatgtggggattttttcatgtattcttttgtggttgttttatccgttgacttatctgaagcacgggcgcaaaatgctggctctgctggttgtctgcttgttgtggggctttgcctttatctccggattaagctcgtcggtggtgcgtgcagtggtgatgtatagtctatacacccttgcctcattctgtctggaagaacgtttttcgggtatgcactccctggtattggctgctttcctgatgctggtgtataatccattctttctttttgatataagttttcagttgtcctttgttgccgtcttttccattctggcgttttatcctttgttctcgcgtagcttatgtatcaaaaatcgtgtgctgcgttatgtatggaataccctcagtctgtctatgtcggctcagctaggtacgttgcctttcattctgtattactttggaagtttcccgacctattttctgctggctaatttggttgtagttatattggctggtgtaatattggtgctgacgtttgctgcgttatgcttggcttccgtccctatagtgggaaatacggtgattaccttgttggaatggggtactttaatcttgaatgaatccatgcagggagtacagcaactggccggttctcagattacttccgtctatttatcatcccctcaagcctgtttgctggctggagtgattatttgcctttatctttgctgggcatccggaatacaccgcaaggcttccgactggattcgtttattggcggtttgtaatctgtttgtggcggtgtcttgtgtggaatatgcaggagaagctccggaacagttgtatttcttccgttcggaaatctacacccgtaagaaagactgtgtctccacccatcgttctgaaacggggttgttgtgtattcgaaatatgcatattgcagtgttgaatgatgcccgctggagaacgtatgagtcttcatcgcgtttccctttggagtatgcatatatttgtaagggatttaaagggagccttttgcagttggacaaactatttgccattcggcaagtaattttggacagctcactgaatgatgctttccgtgaaaagcttataagggaatgtcaattacttaaaatatcttatacagacctttctgttcaaggttcttattccgttgtgctgtagtttataaaaataaatttgtacttttgctcctttcaaaagtgtaagtttaagaaaaagaatatgttgtcaaaagtaattcttcaggcccatattgataaagttgagacctattttgaccgggctgataaagtggtgattgtgacccatgtttctcctgacggagatgcgctgggttcttcgttgggcttgtatcattttttgtctgtacatggcaagaccgtgaatgtgattgtacctaatgcatttcctgactttttgcggtggatgcctggagcaaaagatattattcgttatgataaatacgctgagtttgccgataagctgattgctgaggcagatgtaatctgttgtcttgattttaacgcattgtcgcgtattgaccggatggcagatgcagtaagagatgcacagggaagaaaggtgatgattgaccaccatctgaatccggaacctttttgtcgggtgactatttcacatccggaaatttcttctacttcggagttaatctttagattgatatgccgtctgggatgttttgatgacattactttggaaggtgcagaatgtatctataccggaatgatgacggatacgggaggctttacttataactccaataaccgtgagatttatttcattatcagcgaactgctatctaagggtattgataaagatgatatttatcgtaaggtgttcaatacgtattcagaaggacgtcttcgcctgatggggtatgtactttatgaaaaaatgcaggtatatcctcagttccgtgcagctttaatctgtctttcaaaggaagaacagggcaaattccgttatgtaaaaggagatacggaaggctttgtaaacattcctcttcagatgaagggaatttgtttttcggtattcttgcgtgaagataccgagaaggatatgattaaggtttcgcttcgttcggtaggagcattcccctgtaatcaggtagccgctgaattcttcaatggaggtgggcatttgaatgcttccggtggagagttttacggtacgatggatgaggctgtagacttgtttaagcaggctttggtgaaatatgagagcttgttattgaaaaattagtgagaaatttttattcttgaacaatattagacataattggacaaaataggaaggatgtttttgagacattttactacatttgcccgtgtaaacatgcttattaagatgaaaaagaactatttgttgtgggctgtaactgccctgataatgttggcactgcagagttgtaataacggaaagacctacgctgaaatgaaagaagaggaggcagatgctattaataagtacattttggaaaatgatataaaggtgatttctgaagcagattttgctgcgcaggattccactacgaaagaaaatgaatatgtgctgctggatgaaagcggagtgtatatgcatgtggataatcgtggaccaggtgaagaagtgttgggaaatggaacgtatgatatggttgcacgttttgtagaaatagcacttcagacacgcagtgacttaggtatgacggcaggagatacattgctggctaattttcacgtgtccaatccttcgtatacgattaaaggagaagattttaaactgaccattagtggtgagtcgtattctgcttcatttacccgcagtgattcttatagcatgtatggcatgtatggaacagtagccgttccttctggttggttgattccattgcgttacttgaaaccaggaaaaacgactgattctggagaaattgcacgtgtgaaactgattgtgccgcatagtgaaggtacttcttcggccactcagtctgtgtatccatgtttttatgaactgacttatgtaaaactgtgataacctaaaaacctaaataattaaaacctttatttatgacacttattaaatctatttccggtattcgtggcactataggcggccatgccggcgaaggattgaatcctttagacatcgtgaaattcacttcagcgtatgctacattgattcgtaagactacgaccaataaatcaaataagattgtagtgggccgtgatgcacgtatctctggtgaaatggtgaaaaatgtggtttgcggaacgttgatgggaatgggattcgatgtagtaaatatcgggttggcttctactccgactacagaacttgctgtaactatggaaggagcatgcggtggtattattttgactgccagccataatccgagacaatggaatgcattgaagttgttgaatgaacatggtgaattcctgaatgcggcagaaggtaatgaggtattgcgtattgctgctgcagaagaatttgaatttgcagacatcgaacatatcggtaagtaccgtgaagacaatacatacaaccagaaacatattgacagcgtgttggcgttgaaactggtagacgtagaagctatccgtaaggctaatttccgcgtggcaattgattgcgtaaactctgttggtggtgtggtattgcctcaattgttggagcagttgggcgtacagcatgtggaaaaattgtattgcgaaccgactggcgacttccagcataatccggaacctttggaaaagaacttgggtgacatcatgggcctgatgaagaaaggaacttgtgatgtagcctttgtggtagaccctgacgtagaccgtctggctattatctgtgagaacggagctatgtatggcgaagaatataccctggttacagtagcagattatgtattgaagcatactccgggcaatacagtttctaacctgagttcaactcgtgcactgcgtgatgtaactcgtaaatacggtatggaatacaatgcatctgcagtgggtgaagtaaatgtagtaaccaagatgaaagctactaatgcggttatcggtggtgaaggtaatggtggagtgatttatccggaatctcactacggacgtgatgcattggtaggtattgctttgttcttgagtcatctggcacacgaaggtaagaaagtaagcgaattgcgtgctacttatcctaattatttcattgcgaagaatcgtattgacctgactccggaaacagatgtagatgccatcttggcgaaggtaaaagaactttacaagaatgaagaaatcaatgacatcgacggtgtgaagattgatttccctgataagtgggttcacctgcgtaagagtaacacagaaccgattattcgtgtgtattcagaagcttctacaatggaagctgctgatgaaatcggtaagcagattatggacattgtatacagtctggctaaataagaagagcgttagcacattcttttgaaaataaaatgaattccggaatgaaataaagcggttagctggttttcattccggaatttttttgtgaatgtgtgatagagaaaatgtgtgtaggggttattccttttcagattcttctgaagaaatgggagctaattctgaatgtaatgccgattctttttgtggtgaaccaataggggacgagttttcttctgacgagaaaccagcatggaataatgcgtaaaagaagggcagaataactttttgagtttccataatgcgttgtttttaggggtttgtaatgaaaacgccaaaatgtgaatatccccctattgaggaagtgttaaataatctaatcgtctacccataacaggtcgctcatgattccatcggagatgaatatccctttttctgtgagtttcatgatgtgattatcgagtgtcaggaatccttgtttcagatggggagaagccatgcgcatgcagtaatcaaataaggtttctccaaatgtttctttcagtatatgggtggggatgccgtaagtagtgcgcaggcgggtaatgataaagtcattatagcgcgtatacagatcaagctcttccttttcctgataaggcgttcctttttgaataccttgtatatactgagaaagggaagctacgttccattgtctggaaattccgtcgtaggaatgggcagaaggaccgcaacccaggtattttttgcctgtccagtaactggagttgtggcgtgaatgaaatcccggtcggcagaaattggatatttcataatgttcatatccgttgctcttgagggtatgtatcaactccttgaataaggaaacgcttaaatcttcatccgtttcttccacttgatgtgcttctttcaagttccataaaggagtaccttcttcataaatcaggtgataggctgaaatatgctccggacgcatctgaagggctgtttgaaggtctttttgccaatcttctaatgtttctccgggcagcccgtacatcaaatcgatactgatattctgaaaaccagcttctcggcaatgttggtatgcttgttgagcctgagcagccgtgtgccggcggtgaagcagacgaagagtatcttccttgaaggtttgtatacccatgcttaaccggttaaacgggagggtacgcagcatggctatgtattgaggtgtcaggtcgtcgggatttgcttcaatcgtaatttcggcttttgggtttatggtatatatcttatagatggtttcgaaaagttggatgaaatctttttcttctaattgtgaaggcgtacctccaccaaagtagatggtgtcaataatttctccatccagatagtctttccgcagctcaagttctttggatagagcctgtacgtatgtgctttttttatcattttctgtcgtagaaaagaagtcacagtaaatgcaacgtcgtttgcaaaaagggatatgaagatagatgccagccataattaatctactgtaagaagttgttttacgggtgtaaagatacggataatttatgggaggaaagaaggaatgcagattttgtatgtctgaaaacatagtttagtaacacgaaactttttattgtttttctgaattataatctctaatttgcgcttcgttaaaaaataagagatatgaaaagcatatcctttcgttactaaactaaatcttgaaataccatgaaagtatatcagacaaacgaaatcaagaacattgcccttctcggtaatgatggctcaggtaaaaccactctcacagaagctttgctctatgagagtggtattataaaacgtcgcggaagaattactgccaagaatacggtgagtgattatttcccggtagagcaggaatacggatattcggtattttctactgtatatcatgtagaatggaacggaaagaagttgaatattatcgactgtccgggaagtgatgacttcgtgggagctgccattaccgcattgaatgtgactgatacagccattttgttattgaacgggcaatatggtccggaagtgggtacacagaatcacttccgttatactgaaaaactgggtaagccggtgattttcctggtaaaccagttggatagtgaaaaatgtgattttgaccatgtgcttgaacagttgaaagagaattatggttctaaagttgttccggttcagtatccgcttagtacaggacctgacttcaattcgttgattgatgtacttttaatgaagaaatattcttggggaccggacggcggtgctccaaccattgaagacattccggcagaagaaatggaaaaagcgcaggaatggcataagacgctggtggaagctgcggctgaacacgacgagagcctgatggaaaaattctttgaatctgaatcgctgacagaagatgaaatgcgtgaaggtattcgtaagggattggctgccagaggtatgttcccggtattctgtgtatgtgcaggtaaggacatgggcgtgcgtcgcttgatggaattcttgggcaatgtggtaccgttcgtggatgaaatgccggtagttcacaatacacgtggtgttcctgttcctcccgatccgaatggtcctacttcactttacttctttaagacagctgtggaacctcatatcggagatgtacagtactttaaagtaatgagtggtgtggtgcatgaaggcgatgatttgagcaacgcagacagaggttcgaaagaacgtatggcacagctttatgtatgtgcaggtgccaaccgtgaaaaagtagacgaactgcgtgcgggagatattggctgtacagtaaaattgaaagatgtgaagacgggcaataccttgaatggcaaggattgtgagaaccgattcaatttcattaaatatccgaatccgaagtatacgagagctatcaagccggtaaatgaagccgacacagaaaagatgatggcggtgttgaaccgtatgcgtgaagaagacccgacttggattgtagaacagtctaaggaattgcgtcagattctggtacacggtcagggagaattccatctgcgtacattgaaatggcgtctggaaaacaacgaaaagttgcagattcagttctatgaacctaagattccatatcgtgaaacaattactaagtcggctcgtgcagattatcgtcataagaaacagtcgggtggtgccggacagtttggtgaagttcacttgattgtagagccttattatgaaggtatgcctgctccggaagtgtacaagttcaatggtcaggagtataagatgaacgtgaagggtacggaagtaatcgacttggaatggggtggtaagctcgtatttgtcaacagtgtagttggtggagcaattgatgcccgtttcatgccggctattttgaaaggtatcatgagccgtatggaacaaggaccgctgactggttcatacgcacgtgatgtacgtgttattgtgtacgacggtaagatgcacccggtagattcaaatgaaatttccttcatgctggctggtcgtcatgcgtttagtgaagcatttaagaatgcaggtccgaagattttggaaccgatttatgatgtggaagtattcgttccgagcgacaagttgggtgacgtgatgagtgacatgcagggtcgtcgcggtatgattatgggtatgaccagtgaaaagggatatgaaaagttgagtgctaaagttccattgaaagaaatgtcgaactattctacttctttaagctcattgaccggaggtcgtgcttcatttattatgaaatttgccagctatgaactggttccgacggatgtacagaccaagctgatgaaggaatttgaagagcaagaaaaggacgaagcataatattagttgtgatttttatagataaaaaagccgtgtttcttaaaaagcacggcttttttttgtttaacttagcttaaacaaaaccctctatttatttgttattaatctaaaattctattatttttgtaatgtatagctgcttgaaataatagatagtgtagattttatcaggtaaaatttgatttatggttaatatacgacaaaatcttatttaaagcttgttaatctgttagcgtcgtatttgtcaggttgttaaatttgtccgtatgaaaaaatcgactatttggatattaggagttgtaatgggactgtctttcttgagcttgctttatttgcaggtaagctatattgaggagatggtcaaaatgcggcgtagtcagtttgaagagaatgtaaaccgcagtttgggaaaggctgtgcataacctggaactggttgaaacgaaaaaatatctggagaaagatgtggcagcgcaggaacgtgcggcattgttgtccagacaataccaggaaaagaacgatgcaggcgagaatgtggtagaacatcatcagtatacgattaccgcacctgacggttctacttactctacttttgagctgaagaccattatgaatcggccgtcgaatgtgcctaaggtggtcatatctacgggaagaactattccacaaacatcgcgtgcattgcaggagattctgaaagaacgttatgtgtatcagcgtgcattgctggatgaggtggtgtataatattctttatacggcaagtgacaagcctctgaaagaaagagtcaactttaaacagcttgaccacttcctgaaaacagaactgtttaataatggcatcgatattccttatcatttttcggtgacagaccgggatgggaaagaggtgtaccgttgttcagattatgtgcatgacgatgaaaaaatctattctcgtttgctctttgaaaaagatcctcctgctaagatgggttttgtgaatattttcttccccacactggataattacatattcagttcagtgaagtttatgattccatccatcatctttacggtggtgttgttgattacgtttattttcacgatttacattattttccgtcagaaacgcttgactgaaattaagaatgatttcatcaacaacatgacgcatgagtttaagactccgatttctaccatatcgttggctgcccaaatgttgaatgatccggcagtgggtaaatcgcctgtgatgtttaagcatatatcaggagttatcaatgacgaaacgaagcgtttgcgttttcaggtagaaaaggtgttgcagatgtctatgtttgaacggcagagtgtgacacttaagaaaaaggaaattgacgcacatgagttgattaatggagtggtgaatactttccgtttgaaagtagagaaaaacaatggtacgctggaggcggaattgaatgcgcaggatccggtgatttttgtggatgaaatgcattttaccaatgtggtattcaacttgctggataatgcagtgaaatataagagtccggatcgtgatattgccttgaaaatccgtacatggaatgaaaacggaaagctgtgtatttcagtggaagataacggtcttggaatcaagaaagagaatttgaaaaaaatattcgataagttctatcgggttcatactggaaacttgcatgatgtgaaaggttttggacttgggttggcttatgtaaagaagataatcgcagaccataaaggctctatccaggcggaaagcgaattgaatgtaggaacaaaatttataattactataccattatttaaagaagaataagatatggatgacaaattgcgtattttgctgtgcgaagatgatgagaatcttggcatgcttttgagagaatatttacaggcaaaaggttacaatgcagatctttttccagatggagaagttggattcaaggcttttctgaagagtaaatatgatttggtggtaacagacgtaatgatgccaagaaaagatggttttactttggcacaggaaatccgtcaggcaaatgcggaagttcctattattttcttgacagctaaaacactgaaagaagatattctggaaggattcaagattggtgcggacgattatattacaaagcctttcagtatggaagagctgacattccgtattgaagctattttgcgtcgtgtacgtggaaaacgtaaccgtgaaagtacagtgtacaagattggtcgttttacttttgatactcagaaacagattctgtcaattggtgacaagcagactaagttgactacgaaagaatctgaattgctgggcttgctttgtgcacatgcaaatgaaattcttcagagagactttgctttgaaaactatctggattgacgacaattacttcaatgcaagaagtatggatgtgtatatcacaaaattgcgtaagcacctgaaagaagatgattcaattgagattatcaatattcacggaaagggatataaattgattactccggaaggtgaataaagacttttcggaagtgagcaataaaaaagcctgaatgtttaattcaggcttttttattgctgttgattgaaaaaatcaatctgtaattcttttgttcaggatgatatatgaaatcaatccggcaacaacgagtaacaaagaaactcccaatactgcgttgttgttcacattacctgttgcatagcttgcaatgagaatcacagcaccgatgataaccaatatcactcctaaattctgtaataagcttttcatgtgtgtcttcttttttatggtttatttattcatggttacaaattaaagcataattcttttatccaaaaaattatttcgtgaaaaaaaacggaaatttgagcatatatataagccgttttataaaagcttgacaaatgaaatgatttttatgcttcttgctgagggtaacaagtctgaatcattccacttttttagtcttttgtgttggtaaatattttccgaagcacttcctggctgattcttaattcctccaatgtaagtccgtgtaaggcttcttttagtgtcttgttggcgatgaaacgcgctttttcttctaatttctttccattttctgtcaggtgaattttattggtccgacggtcttttttgtcgggcactcgcataaccagatgttgtctttccatgttgtcaatcagtcgggtcatgctgggcttatctttaaaagtggcgttgcacaactcctgctgggtaactccatccttttcccaaaggtagagtagcacggtccattgctccggtgtaatttccatgtcatttaatcggaaattccggctcagctttctgttaatggcagccgatacttttccatttaaaatggcaaatatcagttgaatgtcaaaattgaattgttctatcatgtaattattgtttaaacaactttgcaaatatatgacatttcacctatatataaagtagagaaaagagagtttggaagataaatatctcttttttaagaatctttattgcataaatatatgggaagtcttggtttcttaattgaaaagtcgtacctttgccgcgcaaataaaaaatcattattaattaatttaattaacgaatagtatgaatcaatacgaaaccgttttcattttaactcccgttttgtctgatgttcagatgaaggaagcggtagagaagttcaaagctatccttactcaggaaggtgcggagatcatcaatgaagaaaactggggattgaaaaaattggcttacccaattcagaaaaaatctacaggattctatcaactgattgaattcaaagcagaaccgtctgtaatcgagaagctggaagttaactaccgtcgtgacgaacgtgtaatccgtttcttgactttcaagatggataagtacgctgcagaatacgctgctaagagaagaaatgtaaaatcaactaaaaaggaggaaaactaatcatggcacagcaacaatcagaaatcagatatttaactccgccttcagtagacgttaaaaagaaaaaatactgtcgtttcaaaaagagcggtattaagtacatcgactacaaagatcctgaattcttgaagaaattcttgaacgaacagggtaaaatccttccgcgccgtattacaggtacttcattgaagttccagcgtcgtattgcgcaggctgttaagagagctcgtcacttggctttgctgcctttcgtaactgatatgatgaaataataaaggaggaataagaatatggaactgattttgaaagaagacgtagttaacttgggctacaagaatgatattgtaaccgttaagtctggttatggtcgtaactatcttattccgacaggtaaagctgtgattgcttctccggctgcaaagaaaatgttggctgaagaactgaaacagcgtgctcacaaattggagaagattaagaaagatgctgaagctgttgcagaaacattgaagggtgtttctttgactatcgctacaaaggtaagtgcaacaggtgttatctatggttcagtaggtaatattcagattgctgatgaactggctaagttgggtcacaacatcgatcgtaagattatcgttgttaaagacaacgtaaaagaagttggacactacaaagctgtggttaaacttcacaaggaagtttctgtagaaattcctttcgaagtagttgcagaagaagcttaatttgtatctgtaaatactttaataaatcccccgaatggacaacggtctgttcggggttttttatttttgtttgggggtgaagcttgataagaagttggatatggattttagttttcttctctcctggtttgtaagagttaagatgcgaatgtgaagtacgagaaaagtgaggtctgtattctattgtttaaaaaatagtgatggcggtaaaatagtttgtatgggtgaagttgagtgaacaggaaagctatgtgatgaaataataagatgggggtattagtatgtatagttagcaaaagggcataaaaaaagtctgtaggctgagcttacagactttcaattctctctgatgttcgagattattcagctactactgctgagtcagcgcaaactgcagctgaatcgcaaactactgctgctgaatcaacaaccggagctgcttcttcaactactgctactgaatctgaatcagatgcaacttcactgttagctgctttgtttccgcaagaagcgaaagaaactgcagcaaatgctacgaacaaaaatactaattttttcattttctttgctttttaaatctgtaatacttatgttgttttcttaaaacgctgcaaagatatagactttttcaatacgttgttctctttttagccactttttttcaaaaaaatatgttttataacctatttgcctgaattagaatatgttgtaaaacatatttttttcttcgtattttgagaaatttcttaaaagatgaagaaatatgtgtagaagcagtgaatagaggttgcaaattcagaaactcgtttcaggaatcgtgaataatgtgtacctttgcagacttctaaaattgtaaagagatatgattgatacaactatttttcaggataaagtagctgtttattatacgttgggctgtaagcttaattttgcagagacctcttctattggaaaaacgttaaaggaagcgggagttcgaacagccagaaaaggtgaaaaagcagatatttgtgtgattaatacctgttcggtgacagaaatggcagacaagaaatgtcggcaagccattcatcgtctttctcgtcagcatcctgatgcttttattgtggtaaccggctgttatgctcagttgaaacctggacaggtggctgacatagaaggagtggatttggtattaggagcagaacagaagggtgagttgatgaattatttaggcaacttgcagaaacatacgcatggagaggctgtagttaccgctaccaaagacattcgtactttttctccttcctgttcccgtggggatcgtacccgttattttctgaaggtacaggatggatgtgattatttctgctcttactgtaccattccgtttgcacgaggaagaagtcgtaatggaaagattgaagatttagtggcacaagttcgccaggcagctgccgaaggaggaaaagaaattgtgctgaccggagtgaatatcggtgattttggaaagtcaacgggtgaaaccttctttgatttagtaaaggctttagatgaagtggaaggtattgagcgctaccgtatttcttctattgaacccaatcttctgacggatgaaatcattgaatatgtagctcaatcccgtcgtttcatgcctcatttccatattcctttgcaatccggatgcgatgaggtgctgaagttgatgcgccgtcgttatgatacggctttgtttgcagccaagattgcaaagataaagtctctggtgcctgatgcttttattggagtagatgtcatcgtgggtactcgcggagagactcctgaatattttgaaaaagcttatgagtttattaaggggttggatgtaactcagctgcatgtgttcagttactcagaacgtccgggaactcaggctttgaaaattgattatgtggttcctgctcaggaaaagcatgccagaagccagtgtttactggagctttcagatgaaaagacgaaagctttctatgcccgtcatattggtgcagaagcagaagtgctgatggagaaatctaaagcaggtacacccatgcatggttttacaaaaaactacattcgggtggaactggcgcacgatgaaaaactggataaccatctggtaaaagtgcgtttgggtgattttaatgaagacggaacgtcgcttaaaggaactattttatgataaagacagctgtagtcatcttaaactggaatggggaagccatgcttcgccagttcttgccctcagtgattgcttgttcgcgtttggagggaacggaaatttatgtagccgacaatgcttccacggatgcttcgtgtgaggtggtagaaaaagaatttccttctgtccacctgatacgcctggacaagaattatggttttgccgatggctacaactatgctttgcagaaaatagacgcggaatacgctgtcctgctcaacagtgatgtagaggtgacagaaggatggcttcagccaatggttgattatttggatactcatccggagactgtggcctgtcagccgaaaatccgtgcgtatcgtcaccggaacctgtttgaatatgccggagcaagtggaggctttattgaccgttatggttatcctttctgtcgtggacgtatttttgaaaacgtagaggaagataaaggacagtatgacgaggtgattcctgtgttctgggctacgggggcagctttgatgattcgtctggacgtatatcggaatgtgggtggcctggacggacgtttctttgcacacatggaagaaatagacttgtgctggcgtttacgcagtcgaggctatcagcttgtctgcattccttcgagtacggtatatcatgtgggaggagctaccttgaaaaaggaaaatccccgtaaaacgttcctgaatttccgaaacaatctgctgatgctgtataagaacctgccggaagaggaattgaagcctgtgatgcgtgtccgtactttcctggattattgtgctgctgtagtctgggttttgaaaggagattttgccaatgctaaagccgtgtggaatgcccgtcgggagttcttccggattcgcagccagtttactgccaaccgtcagcaaaatctggcccatacagtattgaaaaccatccctgaacgctattctttcagtctggtgtggcaggcaaaagtaaagggccgaaaaaccttttcagccctttcacattaaaatttcttgagttcctgatacaaacgttgcaccggaaggcccatgacattgaaataggatccttccagtcgggaaactcccacaaagccaatccattcttgtactccgtatgctcctgctttgtccagtggccggaatttctctacatagaattcaatttcatcctctgtcagtacgtcgaatgtgacttgagtagtagccgagaacgtacgttgcaggccacgggtcatcaggcatactccggtaattacctggtgcgtcttgccggaaagttcccgtaacatttctttggcatcttccagtgtccggggttttcccaataccttttcgttgatgcacaccaccgtgtcggctgtaatgattaactcgtcttccgccatggaattacgataagcttccgctttttcacgtgagatgtacattggaatttcttccccttttaacgtgtcaggatagctttcatctatatccggaagtaccctgaccgtatattctaaattcagtccgctcagcaattcccttcgtctgggagaattggaggcaagtacgattttataatgctgtatgttttctaatggtttcatctcttccctacttattggttaccagccaaaggcagcctgcccggccatccattttccctgtgcttttaaaacctgttcaatgacgtcgcgtccgcagccatatcctccttgtcggtgagaaatgtatttgctgatggctttgatttcaggtgccgcatctgccggacaacaggggagtcccaccaactgcattacttcataatcgggtatatcgtctcccatgtaaagcacttcttccggtttcaggttatatttttctaacagttccttgtattcacgggtttttacggcagcacctaagtacacatccttgatacccagtccttcgtagcgtttccgaacggcttccgtctttccccctgtgataatggccacatgcagtccgcatttcacagccagctgcaacgcatacccgtctttgatattgacagaacgcatgggctctccgtcgggatgcaaaaagattgtttcggcgctcagtactccgtctacatcgaaaaacagcgcttttatttgagtcaaatcgtaatttatcatatctgaaaaattaaatggtcaatgattggttgtttcatataaatgaatgtgttcgctcagtaaccgatagatttctgccagcttaggctcttcttccagcatattcaggtggcggttaatcacattttcatcgtaacgtcttgacggaccggtttgtgcttccaccggagataattcatgtacctttcgggcggtttcatctatcagtggcagcatagattcgaaaggaagttggtgtgcctgaagcaaatgttggcagatggcgtacatgtgattgctgaagttacaggcaaagacagcagctatgtgcaggtatttacgttgttctgaactggcttcgtacactttcgggctaaggcttccggttatttcctgaagaagggataagttctccggcgaattggcttcgagaaaaaacggcacttcttcaaaattaacttcacgttgtttgctgaaagtttgcatggggtaagctactccgtaatttttgaacttttccttccatacttccatcggcatacttccggcagtatgcaggtacagagcatccggattacagtggacaagttgtgaaatgactgtttccaaaacggcatctttcaccgatacgatgtacaaatcagcgtgttcgtctacttgttccaggcaggtggtccacgcacatcctaatgtctgtgccaaggcttctgccgattcttgtgtccggctgtaaatttgtgacaagtgaaatcccttttgctgcagagcctgagccagatgagtagctacattgcctgctcctatgcatacaatggaaaaatcttttttattcatcatccgcgtgaagataagaagtaaagtaaaactccgatgaccagcaaggtggcgggcaggaggaaagtcgacatctgtcccagcagagagatgaccagtccgatattctgaatcagccagatacctaataaaatgagtccgactgatttgtcacttttgaaccacagaaaaataatggctgcatacagtaacatcgtatctttttgcatcacccatggcagtccgaggtgaccaaatcctacccatttgtctatcaggtagagcagtcctgtcagtacaagaaaaacggctgtagcccgataggtatctttgtgtttgcccgatgctgctgccattatttccctccgaatttattgatatgtaccttttcccattgcaggtgggactcatcaaaaggcttgcgttccatccccttgtgtcctatagcgatgacggatagcacttgcaattgtaaaggaaggtccaacagttcatggatgtattcgttggccggtgtgccgttggcggtaaatctttctcttacctgtacccagcagcttcccagtcccagatcttctgcctgaagctgaatcatgattgacgcaatggaagcatcttcaatccacacatcgctggcgagcgggtcagcagtcactacgatagccagtgcagcatcttttacaaatgccgctcccgattccttacagaaagataacttttccagtgtgtccttgtcgtctacgacgatgaactgccagcaattggagcgtttggaagacggagccatcagggccgccttcagtaatgtgagcacctgatcctgtgtcagttcctcatctgtaaactttcgcatgcttcgccggtttctgattaaatcactgaagttttccataaaaatttcgtttgtttggacaaatataaggcttccccgttaaatcctcaataaaaaaatgtaaatttgcatcacatgaacatccgtttagctacatattatcacgctaaggatgtacccgcccttccgggttcaaacatctttcattctacagaactgtttcatgtgctggaacagacaaggggagttcgtccgcttttgctggtagcctacgaggggaaatctcctgtgggaaagctgttatgtatcactcgccgttccactaatctgttacgttttgccgaaaagagttatgcgtacggcacaggtgaatactttccttcctcctatccgaaagaacacatttttcaggaactgctttcctactttacgcagcagtttgcagagaaatcttttcttttagaatttcgtaatttggaagaacctttgtttggttaccgttatttccggcaaaacggatatttcccgatacgctggcttcgggtgcgcaactctttacaccatgattcgttggacaaatggatgagtacctcccgcaagcggcaaattcatcaggggctgaagaatggagccgtaattgatgtggcacgtacagaagcagatgtgcaggcttttttcagtatgctcaaacattattattcgcccaagattcatcgttacctgcccgacatcggtttcttcactactttgctgacgcattcatcccattgcggacggatttttatcattcgttataaaaacaagattatcggaggttcggtctgcctgttttccggggaagatgcctatttgcttttttccggtgggatgagaaaaacgtatccgctgcagtttccgggagtgcttgccgtatggggagccatgcagtatgcccgtgagcacggatatgctcattttgaatttattgaagccgggttacctttcaagaaatacggtttccgtgactttattctgcgtttcggcggaaagcagatgagcagtcgccgctggtttcatgtgtgctggaactggctgaatcgtctgctgacaaaaatctatgtatagccccctttccatacttctgtcaatggattaaactctttttaaacaacgggatttctttgaaaaaatcgtcaaaaagtttcttttttcagcacaattttcttttctttgtctgtgtgtatattaaacacgtactttaatttaatacccataaaaaacaattctattatgaaaatctctcacattgaacatttgggcattgcggtcaacagtatcgaagaagcccttccttattatgaaaacgtcctcggattgaaatgctataacgtagaaaccgtagaagaccagaaggtaaagactgcgtttttgaaatgtggtgacacaaaaattgaattactggaaccgaccggtcctgacagcacgattgccaagttcattgaaaaccgcggcatgggcgtacatcatgtggcttttgcagtggaagacggagtggccaatgcactggcacaggcagaaggagcaggcattcgtttgattgacaaggctccgcgtaaaggagcagaaggccttcacattgcattcctccacccgaaatctaccatgggcgtattgacggaactttgtgaaaaataaccaccgggaaaagacccttatttaattatcaaatataaatactaataccatgagtaaccaacttgaaaaagtaaaagaattaatagagcttcgcgcacaggcccgtctgggtggaggtgcgaaagccatcgaaaaacaacacgataaaggtaagtacacagcccgcgaacgtatttccatgctccttgacgaaggcagctttgaagaaatggacatgttcgtacagcatcgttgcacaaacttcggaatggacaagaagcattatttgggagacggcgtcgtaaccggatacggaacaatcgaaggccgtctggtttatgtttttgcccaggatttcacggtatctgccggttccttgtctgaaaccatgtcactgaaaatctgtaaggtgatggatatggccatgaagatgggagctccctgcattggattgaatgactctggtggtgcacgtattcaggaaggtatcaacgcgttggcaggctatgcagagattttccagcgtaacattctggcttcgggagttattccgcagatttccggtattttcggtccatgtgcaggaggtgcagtgtattctccggctttgacagacttcaccttgatgatggaaggtacttcttacatgttccttaccggcccgaaggtggtaaagactgtgacaggcgaagatgtatcacaggaagatctgggaggtgccagtgtacattccactcgttccggtgtgactcatttcacagcctctacagaagaagaagggttggcgttgattcgtaaattgttgagctatattccacagaacaacctggaagaaccgccttatgtagattgtaccgacccgatagaccgtctggaagattctttgaatgaaatcgtacccgacagcccgaataaggcttacgatatgtacgaagtaatcggtgctattgtcgataacggtgaattccttgaaatccagcgtgattttgccaagaatatcattatcggttttgcacgtttcaacggacagtcagtgggtatcgtagctaatcagccgaagttcctggccggtgtgctcgattgcaatgcttctcgtaaggcagcccgtttcgtacgtttctgcgatgccttcaacattcctatcgtatcactggtagacgttccgggattcttgccgggaacaggtcaggaatacaatgcagtcatcctgcacggtgcaaagttgctgtatgcatacggtgaagctactgtgcctaaagtaacagtaacccttcgtaagtcgtatggaggttctcacatcgtgatgagctgtaagcagttgcgtggcgatatgaactatgcatggcctactgctgagattgccgtaatgggaggagctggtgccgtagaagtactgtatgcgaaggaagcaaaagaagcacccgatccgaaagcctttatggccgaaaaagaagctgaatacaccaagctgtttgccaacccgtataatgcagctaaatatggttatattgatgatgtgattgagccgcgtaacacgcgcttccgcatcattcgtgccctgcagcagttgcagactaagaagctgaccaatccggccaagaaacacggtaatattcctttgtaacattcacctttttaatgcgtttagttatgaacaaatacatagccggaatattcttcgcatctgctatggtcggtgcactcagttcgtgcaccgcaccggatacgggcagtaaaatcgtcatcaacgaagtcttggtggataatcaagacaactttcaggacgattatggcgtgcatagcggatgggtggaaatattcaacacatcttataatagtgtcaacctggcaggatgttacctgaaagtgagcagtgagccgggcgacaccctgtcttatttcattcccaaaggagatgtactgactgccatcagtcctcgccagcacgctctcttctgggcagacggagcgccgcgacggggcacgttccataccaatttcgtattaagcaagacccgtgacaactgggtaggattgtacgattcggggcggaaactgttggatgaagtggttgtgcctgccggtgtactgaagacggaccagtcgtatgcgcgggtaagcgacggggcagaccaatgggaagtaaaggatgacagcgagaccaaatacgtgactccaagcacaaacaaccagacgctggaaggaaacccgaagatggacaagttcgaacaacacgactcggcggggctgggcatgaccattactgccatgaccgtggttttcatcgggcttattctattgtacatcagcttccgcatcatcggcaaggttgccgtcaagctgcgtaaacgcaacgccatgaaggctcagaatgtcaccgacaagcaggaagcgaaggagcgcggactgggagaagctccgggcgaagtcattgccgccatttccatggccttgcatgaagcacagggagccgaccacgatgtggaagaaaccatcctgaccatcagccgggtgaaacggagctactcaccgtggagttccaagatttataccttgcgtgaaacgcctcataagaaataacctctaaagtataacgaaaaccatgaaagaatacagatataaaatcaacggaaatctctacaaggtgaccgtgggagatatagaagacaataacgtgcatgtagaagtaaacggaacggcctataccgtggaaatggaaaagaagaccgggccgaaaatcaaaccggtactccgtacggcagctaccacaccggcagctcctcctcccgccgtgagccgtccggctgtagcaggaagcaagtcaggcatcaagtcgccgcttccgggcgtgattctggaaatcaaggtgaaggaaggagatgccgtgaaacgcggacagacattgctcgtactggaagccatgaagatggaaaacgacatcaaggccgaccgtgacggtaaggtaactgccatcaaggtgagcaagggagaatcaatactcgaaggtacagaccttataatcattgaatagttatgggagaatttatcaatttcttacaaagcaacctggcggatttctggacttataccggcttctacaatgcgacttaccagcatttcatcatgatagccgtcggtatattcttcatttatcttgccgtggcgaaggaattcgagccgatgctgctgattccaatcggattcggtatgctggtgggcaacattcctttcaatatggaggccggcctgcaagtcggtatctacgaacagggttcggttctcaacatcttatatcaaggagtgacatcgggatggtatccgccactcatcttcctcggcattggagccatgaccgacttctcggcattgatttccaatccgaagctgatgcttatcggtgcggcagcccaattcggtatctttggtgcctatatgattgcacttgaatggggattcgaccccatgcaggcagctgccatcggcatcatcggaggtgcagacggtccgaccgccatcttcctttcatcgaagctggcacccaacctgatgggagccatcgccgtgtccgcctattcgtatatggcattggtgccggttatccagccgcctatcatgcgtttgctgaccaccaagaaagaacgtctcatccgcatgaaagccccacgcgccgtatctcataccgaaaaagtattgttccccattatgggtctgttgctcacctgcttcctggttccttcgggtcttccgctgttgggtatgctgttcttcggtaacctgttaaaggaaagcggtgtgacccgccgtttggcagagacagcccgcggtccgctgattgacaccatcaccattctgttggggttgaccgtaggcgcttccacccaggcttcagaattcatcacatgggattcactgaagattttcggcctgggtgccttgtcattcgtga

SEQ ID NO: 3767 - DNA, 85738 bp, Unknown
  gut microbiota DNA sequence
aaaacgcccttgcgttcaattcaaaacgcacttgtgtttaagaacaaacgtccttgcgtttcaagtcaaacgcacttgcgttttagatcgaacgcacttgcgttttggaggagtattgagactaagagttttatcgtgactttttgttctatagagtagagtatatataaggcaatttgacggaatagatggtcattctttcaattctgttttcgaaagtcattgagttttctgaaatattccatatttttgcccgataaccgttatgaagatgaaagtaaagttatacctgttagggtgggtaataatgatatgcagtgtgatttcagccaaaggacagagcttgaaagaagttgttgctcaggctgaaacggacacagccaatgtttacctgcctgctgattccttgtttgcccgttttttgaaagaaaaacaaattcctgttacgccttgtaatcgtatgactttgttgaagagcggtcgcagcaagtttgaacatttgtttgaagatataaagaaggctgaaaactatatccatctggaatactttaatttccgcagtgattctattgccaaggaattgtttaccctattggctgagaaagccaaagaaggagtgacaatcaaggccttgtttgatgactttggaaatttgtcgaacagtcgtcccctgcgaaaggaacatctgaagatgctggctgaaagaggagtggaaatggcccgtttcagtcccattcgttttccttatatcaatcacgtattttgtcgtgaccatcagaaaattgtggtgattgacggaaaggtgggatatacgggaggcatgaatattgccgattattatatcaacggacttcccgaaatcggtccctggcgtgatatgcacattcgtatagaaggaccggcggtgcagtatctggaaaaagcttttttaggcgtatggaataaggaaacacacgaaggtttgaaagaaggacaagtggcgcacgatacgttgtgcgagggttccggaagaagggtggccattgtgcagcgtattccgaaagtttgtccggaaatcatgcgtgaggcctatattgcggcgttggatgctgcagaacgtaaggtgcagattatcaatccttattttactcctacccgtaaagtcagaaatgccatcaaacgggcggctgaacggggagttcgggtagaaatcatgattccggggaagtcggacatctcttttactcccgatgccggattttatatagccaataagctgcgtaaggcgggagcacacatctacgtgtttaatggaggctttcatcattctaaaatcatgatggtggacgagcggttctgtacggtgggcagtacgaacctgaacagccgtagtctgcattatgattatgaaatcaatgcttttattctggatttacctactactgccgagttgggagaagtatttcagaacgacaagctcaacagtacgattatgacccgtgaggaatataagaagcggagtgtctggcgtcgtttcgtagggtggttcgcgcatttgtttacgccggttatataataataaaaggtgaatatctcctgaaactacgatttttttcttatttttgtccgattgtatagtagtaacagccaaagaagaacctgatttttacggaacaatatgtcgttttttaaggatgtaatcggacaagaagatgtgaaacaacttctcattcatagtgcaaagaatgggaagatgcctcatgctgtgttgctgacgggacctgctggaagtggaaagctacccgtagctttagctgtggcacgttatcttctttgtcatcatcctgcagaaaatgatgcgtgcggccaatgtaattcgtgcaagatgatggaccatctggctcatcctgacatgcattttgcttttccggtggtacgtaaaaaggccggaagggatgtggtttgtgatgaatttctgcctcagtggcgtgaaatgctgggacgtaatccgtatgccgaccttcaggaatggatgcgggtcattgatgccggaaaccagcaacctcagatttatgtgcgtgagagtgatgaaattcagcggaagctttcgctgaaagccagtcagggaggatacaaggtcatgctcatctggcttccggaaaagatgaatgtggaatgtgcgaacaagttgctgaaactgctggaagaacctcctttaaagactgttttcctgttggtgagtgaggaacctgacttattgcttcctacgattgtgagtcgtacgcagcgcattaatttaaagcccttgccggagtcggatattgagcgttatctggtggagcgttatatgcttcctgtggaagatgcccgtgacattgcacaccgttcagccggaagtttgttgagggctgtggaaaatgtgcatttgggagaggaaaacaagctttgttttgaactctttgtgaacctcatgcgtacggcctataaacgtgatattcgtagtttgaaggcgtggagtgagcaggtggcaggaatgggacgcgaacggcagaagaacctcctggaatattgccagcggatggtacgtgaaaactttatctgtaatttccgtcaacctgatatggtatatctgaatccggaggagttgcagttcgccagccgttttgctccttacatcaatgagcggaatattatttccgtgatggaattgctgggggaggcgcaggtgcacattgagcagaatgtgaatccgaagatggttttttttgacatggcgctgagaatgattgtagaaatgaaacaacaataacaatatatggacgatttcaagcttaaaaacggaagtggccgactctgctgtggaggctgcggacgacagaataataaattgaatacttacgactggctggccgatattcctggaaacgcggaggaacaggatatggtggaggttcagtttaagaatacccgcaagggatattataaaaacagcaacgggctgcatctggagaagggagatattgtggcagtggaagccagtccgggacatgacatcggtacggtaacactgaccggaagactggttcccttgcagatgcgtaaggctaatttgaagcctgatgcagaaatacgccgtatttaccgtaaggtaaagccggtggacatggaaaaatatgaggaagcaaaatcacgtgaacatgatacaatgattcgctcgcgtaagattgcagaaagcctgggacttcagatgaaaatcggtgacgtggaataccagggtgatggcaataaggcaatattctattacattgcagatgaacgcgtggatttccgtcagctgattaaggtgctggctgagactttccgggtgcgtatcgaaatgaaacagattggtgcccgtcaggaagctggacgtatcggaggaatcggaccgtgcggacgcgagttgtgctgtgctacgtggatgacgaacttcgtttcagtgtcgaccagtgcggctcgttttcaggatatttcgcttaatccgcaaaaactggccggacagtgtgccaaactgaaatgctgcctgaattatgaagtagatgcctacgtggaatgtcagaaacgcttgccgagtaaggaaattacccttgaaacgttggacaacatgtattattacttcaaggcagatattctgaaaggaactattacttatagtacggataagagtttcctggcaaatgaagtgactatctccgcacgcagagcttttgaagtgctgaatatgaacaaacggggagaaaagcctgaaaaactggatgacgaattctccggacgtgaatcgcagcgttcaaaagacttgctggaacaagagagcttgacccgttttgacaagacaaaaggcggaaagaaccggaaaaagaaacaaaaagggcaggcatcacaaaataatgcgtcagcggctcctgtagaagcaggtaatggacaaactccagacgctcctaaggagaaagaaaataaaggaccgcaaggaagaaataaccgtccacagagaccgaaagggaatccggctccggcggctccacaggcttcagcggctgaaaataccggaaatgcaccacaggccaaagccggtcaggaacctcaccctaaccgcaacgggcggagaaatttccgtcggaataacgagggaaacaaacgtccggagcgtaatacaaatacggatgtacaggcttaaagaatcttttatctattatataaaggcaggactggcactatgtgtcttgttcctgctgaatgcctgtcatacagatacacgttatcatgtatatcaggctgtttctggtgaagaaggctgggataaatccgattccctggctttccatcttcctgtaggactttcttccggtgagtaccggatggagataggcctccgtcataccggagaatattcttaccgggatatctggctttcggtgacgcagtcggaaggcgattcaataccgccccgcacggatacactgcacatttatctgaccgatgaaaaaggacactgggtgcagagtggggcaatgggaggattgtatcagcatgtatatgtgtcagataaaccggttattttctctaccgattcaatagaccgcatttttcgtatcactcatctgatgaggcagaatccattgcctggaatatccgatgtgggaatccggttatttctccctgaccgcgtcaatgcggaggaagacaaacagcaggatggtaaatccccacaatgaggaaccgccgtagctgaagaagggaagggggataccgataacgggggttagtccgagtaccattcctatattgatgaagagatggaaaaagaatatactcagtacacagtagccgtatactcttccaaagcggctttcctgtcgttcggatagcacgataaggcgtagaatgagtgccataaacaagaaaatgaccaaagcggagccgacaaatccttgctcttcgccaatggtacagaaaatgaagtcggtatcctgttccggaacgtatttcaatttggtctgtgtaccgttgagaaagccttttccgaataatcctccggaaccgatggcaattttactttggttgacattgtatccggctcctgcagggtcatctttcattcccaataacacttcgattcgaatcttctggtgaggttcaagtacctgattgaatacatagtcggtcgagaagaaaaagatgcccgagccaactacgaacagaattacatagaaataagctctcagtcgttcacgcagatagaagaaagccagtgtgagtacgatacctccacaaagggctaactggagatgacatacattaaatggaattacatagttggaaaacagggctcctaataacgttcctccgcctccgataccgaaaatgtaggctgcaagtttgggcgactgacgctgacaatattttcccaccagaaaggaagaaagcagaatgaccagcgtcaacacggagaattctccccatgatgtcatttcatcaggcataatttctgcactgaattttaggccgacaataaaaaataccacagcgcagattccggaaaatagaaccgttccggtcatcccttctctgtagagcattaaaaaaaaggataggtacaccagggcagaacctgtttctttctggagtataatcaatgccataggtagcagaatgatgcccaatacagttatcagattgcgggtgcgctgcatctggaaagtatattcgtttatatattttcctaatgcaagggctgtggcaaatttggcgaattcagcgggttgcagacttaccggtcctaatacaatccatgaacgtgaacctttgatttcatgcggattgaagatagtaccgaatagtagcaaaatcataatgccataaagcagataagcgtaggtgtcgtatacacggtcttcaagcatgagtatgacaaagcctatccccagtgaacagcctatccacatcagctgtttaccggcgcgtgtggtaatatccaggaaattcggctcaccataatcgtaacttgctccgcacacactgaaccatccgcagatgaccagtatcaggtaaagtccgatggtccaccagtccacatttttccatacactacctctcatgtatcccataatcaatcctcctgttttgaatctctgtagccatgacttcgtcttctggcgagagtttcccttttaaatacttttcaatcatgagtcgtccgataggtacaccgtataccgcaccgaatcctccgttttccacatagactgctatggcaatcttgggatctttcatgggagcaaatcccataaaggcagagtggtcttttccacggttctgggccgttccggtttttccacatacctcgatgtcgggcaggttggctcctctacaggttccgcccaatacggcagagcgcataccttgcaccacctcctcatagtgggaacggtctaccatggtatatcttttttgtgtgtaaagggtgtcgagtggttcaccttctacttccttcactacatggggggtgataaaatagcctctgttggcaatggttgctcctaagttggctatttgtaatggagtcagtgtgacctcaccttgcccgatggaaatactgatgatggtcagtccattccatgagccccggtaagctttgtcgtagacgcttgcattgggaataaatcctcttttttctccgggaaggtcgattcccaacggataaccgaatcccatggataccatataatctctccaggtgttcatggctttttgtacggttccgtatttctttcgggcgccaatcatgtaatagagcccccagcagaaatatccgttgcaggaagttgctaatgccggaatcagtgaaagcggcgaggggtgaccgtggcagccaacatgaagtccccggaagttgaatccaccaaaacacggataactggtctgggtggttataattccctcttgcaggaaggtcagtgcctgtgaggtcttgaaagtggagcctggcggataggtacccatgatggcacggttcagtaaaggcttccaggggtcacgtgccagtatcaggtggttcttaccgcggtttcttccgaccatttttcgaggatcgtaagtcggtgaagaaactaggcagagtacttcgcctgtagatggttctatggctacaatacttccgatttttccttccaacagacgttctcccagctcctgaagttcgatgtccagactcagtcgcaggttttttcctgctacaggagctttatcgaatttcccgtccatgtaattcccttggattcgtcctcgggcatcacgcaacaatatttcgatacctttttctcctcgtaactgcttttcgtaagaacgctctacacctaatttaccgataaagtcgccgggaatatagtattcatccttttccatatcggatttggaaacttcggcaatatctcccaggatgtgagctccggcattgtaggtatattgtcggatggtacgtcgctggatatagaatcctggaaacttaaacagtttttcctggaacacaccacaatcttcggccgacagctgggtaagaaatacctggttggtgtaaggggagtagccaggattaagccggcgatctttcatgtcacggaatttttttcgcagaaactccggtgagattttcagtgtttggcataaatccatggtatccagctccgtaatttctttcataatcacagtgatgtcgtaagcagcctgattataaaccagcagtttttcattccggtcgtatatgactcctcggcttggatattgtatttttttgagaaaagcgttgctgtcagcatttttcttgtagtcttcactcatgatttgtagtgaaagtaaacgtataagaaaaatcagcacaatcacaatgactgcaccgccaattacatattttcgcttttcaagatcgtagtttctttccactattttttcctcctgacagaatcaacacataagatgaatatgagcgtgacaattgtatcactggcaattttcagcaacagcgtgggcatgttggccaatgagaatgtatccaagatattcagtatgaaagcatgtaataaaacaagaactattgtatatcggaagaatgaagcaaatcccatctgatacatgcctggttcaaagttgtctgtaatgtcacgcaaggaaaacaatctgagaatccatgggcggcagaaggcagtaaatacagatgtggcagcgtttaatcctggtgtattgctgaaaatatcgatgcaaagtcctaaagaaaaggcccataacattaatcccttacggctgttgtctgaatctatcttcaataaaaagtagatatagaacaacggtgtggcatattgttcaaaatgaatgtggttgagtaccagtacttgcagtaagacaagtatgatgaaccattcaagacgtatgatatattgcataattaccttggctttctgtatcgttaatttttatggttgcattgaatgtatgctgtcctcaagttgtgcctgctcagtgccgttgaatgaccctaaaaccctgacattgttcagtcgggcaaagtctgtgaatagattgactttgagcagataagatagtccgtcgtgactgtcttccatatcatctacggttcctacgggaatcccggctggaaaaacagcactatgcccacttgttacaatcgtatcgcccaatgagaattcggagtgtcggggcatatctttgacgtaggcatattgtgaagaacctccttcccatttcaggaaaccaaaataagaggttcgtttgattttacagctgatgctgcttttggaatttaatacgggcagtacaatggcatgatgctttcctgtgagataaacaatgccgactactccgtttccacatacgactcccatttccgggcggatgccgtcggcctctcctttgtcgatggtaatgaaattgttggggtgtgtgatgctgttattgactactcttgcatcatatagcacatagtcttttaatgcttctttacgcaggttagccactcctgtagtgtcttgtgtatattgttctaaggcttgtgacaagcgttccacttcaatttccaattcgacatttcgtgtagttaggtccttgttgacttctgtcaggccaaaatagcgtgttacttgactggaggcttcgtatactattcctgcgaggtagttggcagaagtaaagaaagcacttccctgatagttgttgaaacggaacagcagggtaagtgaaataacctctaatagaacgaaaaggaaccagtgattatatttcagcagaaaattgagcaggtttcgcatgtcagagaatccgaatggtgtataaacgaaaaaatgaaaattgaaaatgaagaaatctgaaatctcttcattttcaatttttatgatattatctcatcaggaatgagaaacgatctacattcttcagtgcaatgcctgttcccttggctacgctcagcaaaggatcttcagcaatatggaaaggaatgttgattttatctgtcagtcgtttgtcaagtcctctcagaagcgctccgcctccagccagatagataccattgtttacaatgtcggcatacaattcaggaggtgtattttctaaggcacttaaaatagctgtttctattttggcaatgctcttttccatacaatgcgcgatttcctgatagcataccggaacctccatcggcagggcagtgattctgtttggaccacgtacgatataatcttcaggtgcatcatctcccaggtctgtcatggctgcacctacgtgaatcttgatacgctctgccattctttcactgactttgacattgtgctggcggctcatgtattcctgaatatcagctgtcaaatcatctccggctacacggatagagttatttgaaacaatacctcccaaagaaatgacggcgatttccgtagaacctccacctatgtcaactaccatgttaccttccggagcttctacatccagtccgataccgatagctgcagccataggttcgaatatcaggtagacatcacgtcctcctgcatgttccgcgctgtcacgtacggcacgtaattctacttctgtagaaccggaaggtactccgattaccatacgcaaagagggagtgaagaaatggcgtcctgtatttacttttttaatcaatccgcgcatcatctgttcgcaagcgttgaagtcggcaataacaccgtcacgtaacgggcgtacagtgcgaatgttcggattttctttttcgtacatcagcttggcacgttcacctacggcaatcatcttgtctgtgcgacgatccaatgcaacaacagatggttcgtctaccacaatcttgtcattgctgataatgatggtattggctgtgccaaggtccatcgctatgttttgtgtaaaggagaataatcccattcctttaatataagtctagaattttgaaattaataaatccgttttaggaagactgaatgactgccagcacaattattttttgaaataatcgcggatagcagtgtcgtagtgtgaagaaacagtaaatgcttcacctgcaaaccaacggcgttgttcgcgtgtggttacagctccctgtttgttgaggatttccaataagggttggtattgatgcttgctggctacgattactacatcattgaagttcttagctccggcacgaatcaatgagataccgcctatatcaattttttcgatgatgtcttgttctgctgcaccgcttgcaactgtatcttcaaaaggatacaagtctacaataaccaggtcaatctctggaatttcatactgagcaacctgcttctggtcgccttccagttctctgcggcagaggatacctccaaagattttaggatgcaatgtcttcacgcgtcctccaagaatagaaggataagtggtaatgtcttctacagccttgcagggataacctaatgattcaatgaactgacgtgttcctccggtagacaagaactcaacgccttctgcatgaagcttggccaggatggcgtccaaaccgtctttatggtaaacagacaccaatgcggtctttattttctttgattctgacataaatgtttgatatttaaaattcaggtgcaaaattacgaattttcagatgataaacgcaggataatgagcataaaatatcttttttttgcattatcactgaaagttttaatgctgttgtttgaagagaaacaaagttttttcaggctgtcctttttattttgtaacacgattgtaacatatatgacattcttttataacacgaacgaaatatttttgcactcggaaaaaacttaacaaaacaagtatggaaactgtttatttaggaattgttattttcttatttatgctggcggtctttgatttgctggtgggcgttagtaatgacgccgtgaattttatgaattcggcggtgggggcaaaagtcgcaaagtttaaaacaattattattgtggcggctatcggtgtcttctttggtgccgtactgagtaatggaatgatggatattgcgcgtcatggtatctttcatccggtaaatttcagcttctatgagattatgtgtatcttgttggctgtaatggtaacagatgtggtactgctggatgtgttcaatacattggggcttcctacttccacgactgtatccatggtgttcgaattgctgggaggtacatttattctggcaatactgaaaatactcggcgatgaaaccggactgttgagtctgggcgacatgatgaatacggaaaaggcgctttcggtcattatgggtatcttcctttctgtggccgttgcttttatcgcaggaactgtggtacaatatctttcccgcttgattttcagctttaactataaaaagaatctttcctggaccattggaatatttggcggtgtagctgttacatcgttgagctattttattattatcaatggacttaaaagtgcttcgttcatgactccagaagcgttggcctggattcaggagaataccgcgatgctggtgggaggctgttttgtgatatttaccgtgttgatgcaggtgctccactggtgtagggtgaatgtcttcaaggtgatagttttgttggggactttttcgttggctttggcatttgccgggaatgacctggttaactttatcggtgtgcctctggccggtttttctgcctatacagactatgtggccaattcgaatggagccggtatccatgatttcatgatgtcttcccttatgtcttccgcacagactccgctgattttcctggtcatttccggtgtgattatggtctatgcactggccacttctaaaaaagccaagaatgtaatcaagacctctgtcgacctggctcgtcaggaggaaggagatgagatgttcggctcttctgcactggcacgtgtgattgtgcgtcgtgcaacgagtatcaatgattttctggtacgtgtgattccggtaaatgtacgtcgttggattgacggccgcttcaataaagatgagattattttggctgacggggccgcttttgatatggtacgtgcttcggtgaacctggtattgtccggattgctgattatcatgggtacaaccatgaagctgcctttgtctactacttatgtgaccttcatcgtagcgatgggtagttcgctggccgaccgtgcctggagtcgtgaaagtgcggtctatcgtatcacgggcgtgctttctgtgattgggggctggtttatcactgcttttgtcgcatttactatttgtgccttggttacattcgttatgttttacaccagtttcttcggtatgtttgcttttattgtggtggcagtcgtacttctggttcgtagtaacatcagatatagcaagaaggaaaaggtagaaagccaggatgatgtgttcaaacgtatgatgagcagcaaagacaagagtgaaacattggctctgctccgtcagcatgtgcaggaaacactgactgattacgtgggtttctgtgagaagacgtatgtgcaggtaaccgacgggttcatcaatgaagatttgcgtagcttacgaaaggctatgaatgcgacggacgaccagaagaaaatgttgaagaaacgtcgtcgtaaagaaatacttggtctccgccgtttgccaataaccgtggctatggaaaagaatacttggttccacttgggaagtaacagttgcgaacagatgctttattgcttgaagcgaatttgtgaaccgtgtaaagaacatgtggacaacaactttaatccgatttctccggattgtgtaaaagaattcttgcctgtacgtgatgaattatgcaaactgatggaacgtgccaaagtggctatcagccaggataattatgaagaagcggatgacattctgaaaaaaggagatgacctgaaaaatcgtatctctgctttgcgtaaacagcagatgaaccgtatgcaggaaggtgataatgcaagcttgaaggcatctatggtatatttgaatattcttcaggaatctcaggagttggtaagtatctggcgtcatttgcttcgtgccagccgcttcttccagggagattatgtgcctcaggaagtttcaatgattgcgcttacagaagaaagataattttgtgtacttaaagaaagccgataaagggttaatctcctttatcggcttttattgttttatttgtcttctatttcagtaagatttccggttgtggagttcatgataaatcctcttacttttatgtcttgaggtacgagcgggtgatggcgtacgatgtgtacactcttttgtacggcttcttccgtgtcgttaaatccgctgagccatgagttaaggttgatgtcacaatattgcatcatttcaatatggtcttgtgaaattcctctttcacgcatgtgctgtaacatggtttcactgtccatgtgctgtacgccacaatcggtatgtccgataatcatgacttcttccactcctaattcatagattgccacaagcaagcttcgcatggcactaccgaaagggtgagtgatggtacctccggcattcttgatgattttgacatcaccgttttttattcctaaggctgcgggaagtagctctgtcaggcgagtatccatacaagtgacaatggcgatttttttgtcagggtatttgttcgtaatgtacttttcgtatcccttggtttctacgaaagtcttgttgaagtttaataattcgtctatcataacatttatattttgtatagaatatgggcaaaaatacagatttattttgtgatatttcagttggcttttggaggaattcttaaaatcatgcacttatcatgaagaagcttctgattttttcgtacttttgtagaaaattcaaccaaactattaaaatatggctaaagaactcgaactcaagtacggctgtaaccctaaccagaagccggcccgcattttcatgcaggagggagaactgcctattgaagtattgaacggacgtcctggatacattaacttcctggatgcgtttaacggatggcagttggtgaaagaattgaaagaagctaccggaatgccggctgcaacttcgttcaagcacgtgagtcctgccggagccgcaatcggtctggaactggatgaaaccatgaaaaagatttatttcgtggataatttacctttgtctccgttggcaaatgcgtatgtgcgcgctcgtggagcagaccgtatgtcatcgtatggcgattttatagctttgagtgacgtctgtgatgaagaaacagctcgttttatcaatcgtgaggtttctgacggagtgattgctccgggatacactgacgcagcccttgaaattctgaaaaataaacgtaagggtacttataacgtgattaaaattgatccggcatatcgtccgaatcccattgaacggaaggatgtgtttggtatcacttttgagcagggacgtaatgaggtgaaattgaatggagcagaattgtttgagaatattccgactcagaataagaatttccctgaagctgctaaacgtgatttgatgattgcattaatcactttgaaatatactcagtctaattctgtttgctacgtgaaagatggacaggctatcggtattggtgccggacagcagagccgtatccattgtactcgcctggctggtaataaggctgatatctggtatttgcgccagcatccgaaggtgctgaatttgccttgggtagaaaagatccgtcgtgccgatcgtgataataccatcgatatttatattagcgaagatcatgacgatgtattggctgatggagtatggcagcagttcttcactgagaaacctgaagtattgacacgcgaagaaaaacgtgcttggcttgatacattgaagggagtatcattgggttcggatgctttcttcccgtttggagataatattgaacgtgctcacaagagtggcgtggaatatattgctcaggcaggaggttctgtgcgtgatgaccatgtgattgaaacttgcgataaatacggtattgcaatggcatttacgggaatccgtttattccatcattaataattaattagtctgaaaatagaggggtaaatttgccggctgggatgaaagtcaagtgaatttacctctctttttttgtaaatagtatttgatttactatctttgcagaaaattgatactaatcttgggcttgtttggttttgacagcgagagatgtggtatgtaagcatgcagtgcgtcagtgatttgcactataatctcagttactgaacaattatctggcaacgaaaactatgctctcgctgcttaatcgaagtacagtagattagctttatttccgtcaaagtgatggaaacgagacatcgctcaaaagctcttgttccgaagcgtttggtttagcggtgcagcaaattcggaaatagttttggtctcgttccgcgactgaaatgaaattttaggaactaaggtataagtgggtggctctggtcttgcttatgcacgaaaaccgaaggcagagataagcatgtagaaagcatatggcttccttgtttggacgagggttcgactccctccaggtccacgatgattattaaaccgctgaacatcagcggttttttttgtttttttaagctcttattctttccccattttatcagtcagttccatcagaaaagctatataaaaatctgcagctctatttggatagagctgttctatattattgtccgatgcaatagaagttgtacaggaaatgtctttacgatgatatcacaacacgttcgtgttaagacctcgacacgtacgtgtcgacctctccgcacgaacgtgtcatgacctcgtcacgtacgtgtcgaggtaaatctggttttgtcttcgggaaataacggacggatatttcatgaaaaagttcaggatttctttacaaacaaaagaggccggtatctcagcggagaaaccagccctgaatttgagtaagattttttatcggattgattataaagaaaatgcgacagcagcaagtttttaatcggtaatggtgtcatcgaagttttctattcgggtgactttcttgatgtggtctaatttcttaagattctcgcagatggtatttacatcatctacatcgtgtacaaacaattgaattcggccttcaaaaatgccatcattggactcgatattcaatttgtgaatatttacgttcaactgttgggatataattcctgttacttggttaagcactccaattccatcgattcctttcatgtatacatttaccgggaagttaagtgctttacctgtttcccattgtacggccaataatctgttgccaaagctggttttcagttgcgtagctatcgggcattggcgcttatggataataattcgattgttgtcgtcaatatatcctaagacatcatctccgggaattggtttacagcagtctgcaatgatgtagtgcttctgaatttcttcaggcgtaagcttgacaattttcttcttgtcaatgttcaaagcaggtttttctttggaagatgcattatcctgagatttgggtttgcttcctcctccaaatgcaaatgcaatgtattttttccagtttgtgggagtggatttttcttttaactcattcttttccaaatctcctaaggtgaaaactttttgcccgatctggtacatcaagtcttcaggagtttttagtttatgaagggtacaaagcttctggatgttcgtttcagtagcttcaatgccttctttcttaaggaattcatgcagcatgtcttctccggcctgctggacttcctttcgttctcttttgaggatggataatattttagccttggcttttgctgtcgtggcaaaattaatccatgaaggttgtactttctgtgattttgaagtcagaatttctacctgatctccactttgcagtttatggctcagtggtaccagtttatggtttactttagctccaatacaatggcttcctaagaatgtatgaatggagaaggcaaaatcgagtgcggttgcattctgaggcattgttttaatttcacccttaggagtaaatacaaatatctcagatgcgaaaagattaagcttgattgtatccagaaagtcaagggcatcgggctgcggatcatccaaaatttctttgatggttttcagccatttgctaagctctccttcgtcttcacttcctcctccttctttgtatttccagtgtgcagcaaaaccttgttctgctacatcattcattcgctcacttctgatctgaacttcaatccactgtcctttgttgctcatcaatgtcacatgaagagcctgatatccattggcttttggatggctgacccaatcgcgcaaacggtcaggatgaggcttatatatccgggaaatagctacataaatgttgaagcagtcattcagttcttcctcttcattcttaggagtgaaaatgatacgtacggcaagtatgtcatagatttcttcaaacgtaatgtgtttgttttgcatcttgttccagatggagtagggagacttgatacgtgccagaatacgataaggaagccccattttatctaattgttcgcgaatgggagctgtaaattcttcaaataggttggttctttcagcttgagtagcctttagcttttcttcgatttgctggtaagcttctgggtgttcgtatttaaaacttaaatcttccaattctgttttgatacgattcagacccagtcggttggcgagaggagcgtagatatagagtgtttccccggcaattttatattgtttgcttgggagcatggagcctaaggtacgcatattatgcaaccggtcggcaatttttataagaatgacacggatatcatcattcattgtgagaagcagcttcttaaagttctcagcttgtgcagaagctctgtctccgaagattcctcctgaaattttggttaatccatctacaatttgagcaatcttaggtccaaacaagttttcgatatcctctacggtatagtcagtatcttctactacatcgtggagtagagcagaacaaatagaggtagatcctaagccgatttctacgcaggcgatgcgtgctacagcgataggatgtagaatataaggctcgcccgaacgtcggcgcactcctttgtgtgcctgtcgggcgaaattaaatgcttttgtaattatctcgacttttttccgatgtttacttttcaggtattggtccaatagctcctgaaatgcttcatcaatcattttttcatctgtctgttcctgcgtaagtttctcctcggtcataattctctcccttttctttgaatcaataatgcaaaaatagagaaaaatacgaatcaaacaagcaaatgaggggttttcttaccggatgcgtagagatttgccagcccggatactgcttcccttgattccgttcagtctccgtaattggcttacgctaactccgtacttagcggcaatgcctcctaatgtctctccgttacggatgcggtggtatacagcttttccgctatttttccctttagtagtggtattgctgacagttacggtgctgcgacgggtttgaaaaacttctggtttataattatagatactatcctcgtggtcaatgaagtaactcattatttgagtaggcaatcgtagtgcgtatggcttttcgtttccagggataatatcttttttaaattctggattaagtgcgcggagctggtctatgtctaccttgcatacttctgccacctgatttaggttcagtgaacggttgatgtgaacagtatcggtactttctggcatgttcatttccatagggctgatataatgttcacagtaataagtcatgatgtaattggcagctacgaaagcaggtacgtaacctcgggtttctttcggtaagaagttgtagattttccagaaatccttttcgcctccagcccggcggatagccttgttgatagtaccaggtccacagttataggctgccagaacgagattccagtcctgatatatatcatataaatctttcaggtaacgtgctgcagcacgagtagatttgaccggatctctgcgttcgtccacaagtgagttgaccttaagcccatatacttgtcccgtgcgaagcatgaactgccataaccctactgcgccctgtgacgaagtggctgtcgggtttaatgccgattcaatgacgggaaggtattttaattctaacggaagatcgtataaatccagtgcctcttcaaaaataggcatatatagattattggcgcttagcataaatgataccttttgacggagacgggtagagtacatgtctataaacttccgtatgatgtcgttataaggcatttctataatagcaggaatacgctgcaagcggtccatgtaaatagaatcgctgacttccggattttgagtagtcatcgtacagttttctgcaggattgatgtaatgcttggaaatccagtccaagtacagactatctgtagtggtaatcattccttccggtaaatctattacatcttcctgcccattggtttgtatggtaatcgttttttctgtctgttgggcaaaaagagaagaagcgttacagattgcagcagtaagtaaactaaaaattattcttttcatcttttaaaatttaatacagcattgcaaaccaactccttgcggacggttgcggaatgcatcgttgaacacggtaggctcccatttcatgctgaggtctttgctgatatcaaaatcagacagctcagcatctacataggcatcaatcactgatagcagatatacaccaatgaatgcaaatatacttaaatcgcgttgacgtcgataaaggtcttttcgttttcggaagatttcctgccaatactccaaacggtcattgacatttgttccgggaggaaggaaatccatatagctgttgttattgggattatcgctcataatgtcttggtaggcttgagaataatccttatacatctgtccgttccatgtcaaggcgtatgcacatcctacgaaacctccataaatgataggtagtttccagtacttccggttgtaaatctgtccggctccagggataacgagtcctaaccatactgtacggttagaattgggtatccagcgttttttctcctgagtgggaggcagagtattttgaatggagtcgttttgtcttgccaaggctgcagtatctaagggggcttccagtgcctctaatgcgagttttcgctgcaggttggttgtatcagccaaagccaggctgtctgcccgattctgtgagcggatagaatcagttgtcagtatgccctccctgcgtttttgggctcgctgtgcatttacctccatattcccccaggggatacagaatagcaggataagcgacagaatatatgtaaaagtatgtgctctcaaattatttttgtttattccgtttttttcaaagaatccagaatctccataattctttccagatctgcatcgctgttgaaaggaatgctgatctttccttttcctttattggtacaggaaagttgtactttcgttccaaagaaattgcacagatgattttgaagcatagagtattcttcagataattgtgtgcctttggcagagattgtttttcctccgctttttatgctttcaccgttagccagtgcttttacaatttcttccactttacgcacggagtacccttgagcgactgtctcattaaagatacgtatctgatttttaggatcttccagagttaataacgcacgtgcatgtcccatatctatttccttgttcttcaaggctacttggatgggggctggcaattttagcagacgtaaatagtttgctatggttgttcgttttttgccaatgcgttcgctcaggcgttcttgtgtcagttcatattgttcaattaaatgctggtaggccagtgcgatttccagagaattcaggtcttcgcgttgaatgttttcaatcaaggccatttccatcacattctcgtcgtctgcagtacgaatgtatgctggaattgtttttagaccagcaagtatggatgccctatatcgtctttcacctgcaataatttgataagaatcttcgtttagtttacgtaaggtgataggctggatgatacctatttctgcaatggaatcagccagttcttgtaaggcgataggatcaaattcacgacgaggctggttggggtttacagatattttgtccagttctatttcgttgatggatgatgatccggaagtttttacttcttcgttggatatcagagcatcaagtcctcgtcctaatgcaaattttttttgtactgccatatacttatttgctatttcttgttataatttcattggctaaagccaaatggtttttagctccggttgattctgcatcataaagaatagcaggaataccgtggctgggtgcttcacttagtttgacattacgctgaataatggtcttgaaaaccagttcctggaagtgtcttttcacttcgtcgtatatctggttggccagacgcaagcgcgagtcgaacattgtcagcaggaatccttcaatttctaatgaaggatttagttttgtcttgataatcttaatcgtgtttaaaagcttgctgataccttccagcgcaaaatactcacattgtactggaataattacagagtcggcagctgttaaggcattgatggtaattaaacccaacgatggagaacagtctatcaaaatgtaatcgtattcgcttttcatcggctctaacgcgcgtcgcatgattttctcacggttctccaaattcagcatttcgatttcagcacccaccaggtcaatgtgagaaggtatgatgtctaatccgtcaatatcggttgtataaatcgcttcccgtatgtcagcctgattgatcagacattcatagattgaacagtcaatgtctttcaaatctacaccaaggccggatgaggcatttgcctgagggtcagcgtcaatcactagtactttcttctcgagagtagctaaagatgcagccaaatttatagtggtagtagttttgcctacacctcctttttggttggctaaagcaataatttttcccatattaatcagtttattctgattgcgaagtaactaataaatgacgatagtttcaattaaaattccatgacttttgggaaagtgttgaaaactcacctcatctgttaataacttcacgcgggcaaagatatatatttttagctaattgcatgatgtggtttggtaagattaagatttgttgtaactttacactcataaaagtttggataataaagatatgatgaaagagaaaccatttctgttgttgtcgaatgatgatggatttgccgcaaaaggcattcaggaactgataaaagtattaaggccaatggccgatttgatggtagtagcaccttctggcccacgttcaggagcttccggttccattacttcagagcatccgcttcgttgtaaaaagatagagtctgcaccgggattttcattgtacagttgtacgggtactcctgtggactgtgtgaaactggctttgcacgacttggtaccccgtacacctgatatggtgatcggaggaattaatcatggagataactcttctgtcaatgtgcactattcaggtacaatgggagttgttatagagggatgtatgaaaaaaataccttcagtcggtttttctctttgtaatcatgcggaagatgcagattttacgcccactttcccttatatacaacgtatcgtagaagaggtcttgcagcatggattacctgtaggaacctgtttgaatgtaaattttcctgatgtaaaggatttgaaaggagtgcgtatttgtcggcaaacagacggagtctggacaaatgagtttgtaaagtctgttcatccaagaggtggaaattattattggcttacaggttcttaccggaacgatgaacccgaggcacaagataccgaccattgggcattagatcatggatacgtagccattactcctactcagatagatgtaacggcttatactttgatggaacaattgaatcactggaactggcagctatgaaatattatttaattgtaggtgaagcctcgggtgatttgcatgcatctaatttaatgaaggcactgcaagcaaaagattctaaagctgagtttcgttttttcggaggcgatttgatggcgactgcaggaggttcactggtcaagcattataaggatatggcatacatgggatttatcccggtgttgcttcatttgcggacaatctttcgtaatatggatttgtgcaagaaagatattgttcagtggaatcctgatgtcttgattttggtggattatccggggtttaacctgaaaatagctgaatatataaaagcgcatacgaatattcctattttttattatatctctcctaaaatctgggcttggaaggagtaccgcatcaagaatattaaacgagatgtggatgagctgttttctatactaccttttgaagtggattttttcaagaagtataattatcccattcattatgtcggaaatccatgtgtggatgctgtacattgttttaagcagggatatgccgagagttttgaggaatttactcttcgtaacgggttggataaaaagccaattattgcgttgttggctggtagtcgtaagcaggaaattaaggataatttgcagcggatgatacaagcatcccgcaactatacagaatatcagtttgttattgcgggagctcctggaatatctcctgaattttatcaggcttatatgggggatgataccaaaattatatttggtcggacatatagcttgctgagtcatgctacagctgctttggttaccagtggtacggctacactcgaaaccgccttgttccgggtgcctcaggtagtgtgttattatactgctgctggaaagctggtttcattcttacgccggcatattttaaaagtaaaatatatttctttggtcaacctgattgcaggtcgtgaagtggtggctgaactggttgctgatggtatgaccgcagaaaatgtggaacaacaactagaagcaattctacccgggcaaatgactcgtgaacaaatgttgcagaattatgatgcgctgattaaaattcttggacaggaaggagcttctgaacgggcagccggaaaaatcgttgaacttttatctcaaaaatacaacaggtccttacagtaagactgaaggacctgttataaattttctgcttatattattcaataaaagaaatgatatacagataaacaaccgctgccggaaccgccatcagagtgctgtcaaagcgatctaacatgcctccatgaccaggtaatatattgcctgagtcttttattccaatagtgcgtttaagcagcgattctgtcaaatcgcctaatgtaccgaatattacaacggtcagggctagtcctatccagatactaatcggcatgaatgggaagtaatgtgccatcacaatggcagctataatgctgaaaactccgccgccaatggaaccttcccatgattttttaggagaaattcgttcaaacaagcgatgttttccgaatagcataccggtacaatatgctcccgtatcattaatccatgtgaaaataaatattgacaacggcagtattgggttgtactgtacctggtaatttgacaattctccttcatttccaatagaatgataggccagtacgtttaacattgcaaacgaaagtgcgatgtagatttggctcatcatggcataggcccaattgttcagtggattttttttctttaaatatagctcgctgacaagcaggtatatgataagaaataagtaaggaatcagtatttctgtttgtccaggcatgactcctaaataggcaaaaccaaagaacagaaatacgccggccaacatacatataggtttgtttatctctacatccggctgtttgctgatgataaccccgaattcatgaatggtcagggctgtaatcagagcaaacaatagggtgaaagagataggacctccaagaatacaaccaatgagtactcctacgaagattattcccgtaattgctcgttgaataaagttatttttcacgttagttggtttttattcggttatgcttctcctttttcctggttttcttcctgtgaaggtatgttattttcagaggaagaattattttcattatccgtattttcctgcttgttttccagctgtttggtttccggtagctgctcattggctgccataatttcttccgaacgggaagtccatggacgtttaccgaaaatcttttcaacatcttcagcaaagattacttcttggtcaattaacagctgtgccagttggttgtggccttcactgtgttcttgcagcaaggcctttgcacgcatgtactgctcattaatcatgtgctgtacttcctggtctataagctcagctgtatgctcactgtaaggtttcgtaaagctgtaatcttcattgctgttataatagcagagattaggaagcttgtcactcattcctgcgtatgcaatcatgccataagcctgtttggtgactctttccaagtcattcattgctccggtggagatgtgtccgatgaaaatttcttcagcagcacgtccacctaatgtggcacacatttcatccagcatttgttccttagtagtgatctgtcgttcttcaggcagataccatgctgctcctaacgcacgtcctcttgggacaatggttactttaatcagcgggttggcatgttccaggaaccatgagatggtggcgtgacctgcttcgtgaagtgcaatggcacgtttttcggcggcagtcatgacttttgttttcttttccagaccacctacgatacggtcgattgcagctaagaaatcatctttatctacactcttcttttgatgacgtgctgcaataagagcagcttcattacatacattggcaatgtccgcaccgctgaaaccaggggtttgtcgtgctaataaatctacgtctacactgctgtccagcttcagaggtttaagatgaactccaaacacttcctttcgttcattcaggtcaggaaggtctacatatatttgtcggtcaaaacgtcctgcacgcagtaaggctttgtccaaaatatctacacggttggttgccgctaagataatgactccactgtttgaaccaaatccgtccatctctgtcagaagctggttcaatgtattttcacgttcgtcatttcctcccatgcttgggtttttgccacgggcacggcctacggcatcaatttcatcaatgaagatgatacaaggcgacttttcttttgcctgacggaacaaatcacgtacgcgagaagcaccgacaccgacaaacatttctacaaagtctgaaccggaaatagagaagaaaggtacatcggcttcacctgccacagctttggctaacaatgttttacctgttcccggagggcctacaagcagagcacctttaggaatctttccacccagttccgtatatttttgcggctgtttcaagaaatctacaatttcctgtacttcctgtttggcagcagcttgtccggcaacatccttaaatgtaatgcggttagtccctttttcaaaaagctgtgctttgcttcttcccacattaaatacgtttgagcctcctccggctcctcctccgccacccatgcggcgcatggcaaacatccagataccgataaggaagacaaacggcagaacgttccacaggattatactaaaatagtcacttttcttttcgtattggatagaaccggtaaagttaccttctttagtctgctcatccagaaacttatccaaagcttccatggagcctatctgtacgttgatggaaggacttcttccgactttgttggcatctttcttgaatacatctacaatgtgatccggcttgatatacatttccaccgtattgttgtcgtatgccacgattttatctgcatatcctttggtaaccatttcctgaaattcggtatagtttacctctttggtggcacttccttcatctccggaaaaatagaggaaggcaaaaatcaaggcaatgatgacataaagccacgttaaattaaagcgtggtacattgattttaggtttattgttgtcactcatatttctctttccttattatatattagtccaaatctggaatgtcggtcagtttggcatctgcccataagtgttccagattataaaaatgtcgtacttccggcaaaaatatatgtacaataacgtcgctataatccatagctacccattgtgcatttctttggccgtctatggcatacgctttagtgccggtctcttttcttacatgttctttgatggagtccacaattgccaatacctgactgggagaatttccttggcaaatgataaaatatttacagatggtatcttctatttcgtttaaatcagctactacgatttgcttgccttttttctcttgaattccttcaatgattttttctattaaagttgtcgtttcgttcattcttttgattattcctattttaaaaattgaaaataaagttctatatataacataggacaaatatacttggttttctgtatatccgaaaatttttacttgaaagaagctgaaaaaagaaaaaaaatatgtttttgggaagaaaaaaatgccgaaatgctttggtatgtcccaaaaatgttgtacctttgcaccgtcaaaacaaaaagatgacaatcgttctctgattttgggctatggtgtaatggtaacacaacagattctggtcctgtttttcttggttcgagtccgagtagcccaacttcatttgcagcgttctcgcggagaggataaagcgttattgggctatggtgtaatggtaacacaacagattctggtcctgtttttcttggttcgagtccgagtagcccaacagaaaaaggtgttctgagtaatcgggacaccttttttgtttcttctttttattttctctttcaaatagaaatattcttttttaccttcttataatcagctgtttatggtttatttgatgcgttgctgacttcttaatggatgttaacttttgtcgttccaaaaacaaaatattcgatatcatggttattaagtcatcgagattgataaaagtaattaggtattaaagtttttgaatgaaaaaatgaaaaaggtaagttttttagtagcagcgttagctgtatctgctctttctgtgaatgcacaaaaagcgtatgaaggaactcgtttcttggataattggtatgtgggtgtgaaaggtggagtgactactcctactactcattctgcattttggcctaatatgcgtgcggaaactggtattgaattaggaaaacagattactccggtgttgggtgtttctttcgaaggattgacaggtatcaatacgtctttcagcaaaacagcttttgatgatttgaatttaggcgtattgggtaagattaacttgaataatctttttgggggatataatggtggacccagattgtttgaagtagaaggtatcgctggatttggttggggacatgattttgtgaactcaagtatgggtgcggaccgttcttatatggtaagccgttttggtgctagctttaacttcaacttgggtgagaaaaaagcatgggctgtaaatgtacgtccggctattgtttacagaatggatggtgaccgtgcacaacaactgaacgtaaacaagtcgaagattgaaattttggctggagtaacttatcgtttcgcaagcagcaacggaaagcactatatgactattcagaagccatacaaccaggctgaggtgaactctctgaatgaggcgattaatgccttgcgtgcagaaaatgcccgtaaagatgaagctttaggagcaaaggatgcagaaaatgcacgtttggaaaaagagctgacagatttgcgtaatgcacctaagcagatagagactattattcagaatacacattctaagtcattggaatcagttgttacgttccgtcagggaaagaccacaatcagtacggatcagatacctaatgtagagcgtattgcaacttatatgaagaataatctgaagagtacggtatctatcaagggatacgcttctccggaaggtagtgccgaagtaaatgcacgtgtagctaagcagcgtgcggaagcagtaaagaatatgttgataagtaagtataaaattagtgcttcacgtatcacagctgaaggtcagggtgtaggatctatgttctcagaaccggattggaatcgtgtaagtattgctactttgagcgaatcagaataattctttttttattgaaataatgtagtctgaaggctgttgcaggtaaatactgtagcagccttttttatgtctctttgttttcatgtatgtttttacatttcttgtacagataaagactgggaaaagtaactgaaaatccttatctttgcgaggaatttgtaaactcatgggagaacgtacacgatacaatgattttgcccggtttttggcccttcattttccttttaaggtgcaaaaaatctcattgaatgtgggatttacttgtccgaacagagatggtgtaaaaggatatggaggatgtacctattgcaataaccagacctttaatccggcatattgtcggacagacaagtctgttacgcagcagttggaggaaggaaaagagttttttgccagaaaatatccggaaatgaagtttttggcatattttcaagcctacacaaatacgtatgcagagctggacaagctgcgtcggatgtatgaagaggcattgcgggtagaaggagttgtcggactcgttatcggtacgcgtcccgattgtatgcccgaagaattgctggattatctggaagagttgaatcggcgaacctttcttttagtggaatatggtattgaaagtacggataatcatactttgcagcgaataaaccggggacatacttttgaatgtacggtggatgccgtaaaacgtacagcagaaagaggtatacgtgtgggaggtcatgtgattttaggacttccgggagaaaatcatgaagctatcatccgtcaggcacgacaggtgtctgaacttcctttgacaacgctgaaaatgcatcagttgcagctggtgcgtggtacacggatggcacatgaatatgagttgtgtcctgaagattttcatttgtacgaggtagatgaatacattgatcttgtgatagattatctcgagcgtgtacgtccggatcttgtgctggaacgtttcgtttcgcaatctcccaaggaactgctgatagctccagactggggcattaaaaattacgaatttgccgttcgtatgcagcgtcgccttcaggaaagagatacctggcagggaaaattctatgaagaagtaaaaaaggaaacaatataatatcaaatttttaaattagttaggattcaatggaaattaaaggtaaagttcattatgtcggtgtgaacgaccgtacaaaagctttgtttgaaaatttgtggccacttccttatggcgtgtcttataactcttacctgattgccgatgacgatatggtcgcattggtcgatacggtagatgtggctttctttgaagtatatattaagaagatacgcagtgttatcggagaccgtaaaatcaattatttgattataaatcacatggagcctgaccattctggttcaattgctctgattaagaaatactatcctgaaattgtattggtaggtaacaagaagactttcgaaatggtagaaggatattatggagtaacaggtgaacgttatgtggtaggtgatggagatttcctgaaactgggacatcatagccttcgcttctatctggtgcccatggtacactggccggaaacaatggtaacttttgatgaaacagaaggtatcctgttctctggagatgctttcggctgtttcggagcattgaacggaggatgcatcgaccgtaacatcaatactgatatttattggaatgaaatgcgccgctactatgctaatatcgtaggtaagttcggtaatccggtacagaaagctttacagaaatgtggaggactgcctatcaagacaatctgtccgactcatggaccggtatgggaagaatgcattccgcaagtggtagatatgtatgacaagctgagccgctatgaaggtgaagaaggtgtagtgattgtgtatggaaccatgtatggtaatacagaagaactggctgaggctattgcagaagaactgagtgcacagggcatcaagaatatcattctgcacaatgtttctcatacgcatcattcttatatcctggccgacatctttaagtataaagctttgatagcaggctgtactacttataacatgcagttgtatcctgaaatggaatctctgttgagcaaggtagccgctcgtgaaatgaagaaccgtctgtttggttacttcggttcgttcacctgggccagcgcagcagtgaagaaattgggtgagtttactgaaaaactgaaatttgaagtagtaggtaacccggtagaaatgaagcagagcatgaaggccgacaattatgcacaggctaaggaattggctaaggcaatggccgaccgtttgaaagcagaccgtaaataagttatctttttgatagatataaaaaaacttccactaaaggattttcccttggtggaagtttttttatggagtgatatatgcttatcagtcttttgcctggtgtacggtcagttgcgggaacgggaatccgataccttctttgttgaatgtgtcgtatacgattttattcatgtcaaaatacacatcccagtagttttcggtcttggtccacacacgtaccttaatatctacactgctggcagacaaagctcccagtccgataaatggagctggagtcgtgaggattcgttcatcggccgcaatgattcgctccagtacagcttttactttttcataatcttctccgtattccactccgaatacccattcagcgcggcgcatgtcttgtttgctgtaattggtgatggcattgctgctcagagcaccgttaggtacgtaaataattcgattgtctaccgtagccagaatggtgtggaaaatctgaatttcttttactgttccgctggcaccttgtccgtcgatgtagtctcctaccttgaagggcttgaatactaagatgattaatcctccggcgaagttagacaggtttccggacaatgccataccgattgccacaccggcagaagctaagattgcagcaaagctggtggtttctactcctaatttgctgatgatggcaaatgctaagatcaggttcagaagtatgctgagcagactttttaagaacgtctgtacactgatttccagtttacgtttttccagaattttgctgaccagtcggctgatttgtttgatgataaaccggccgacgatgtagataataatggcagccagaatgtcttttccaacctcgattccccagttgagcagtctgtccagcagctgttctacgttaatttttgaagcagtattgcttgcttgtgctgtagcttgtaataatgtaagtaacatgtgtaatgtgaattaaaatttttatagttaatcattcatttaatatccccttgccttgtcggacaatttcaggtacatcatcacaacaatttatgacggtagaaggttcaatacctcccgtacctccgtcaataataaggtctactttctctccaaacttttcgtcaatcagttccggttcagtgatgtattcaatgtcttctccttcctctaacggcagagtggtcgtcagaatcggtgcatcgagcaaccgacagatttcacggatgatggcattgtcgggtacacggatacccacttccttccggttgcggaaaatcttaggcagacggctgtccgcattcaggataaaggtaaacggaccgggcagattgtgtttcatcagtttgaaagtggcattactcacgcgagcatattcgctgatgttgctcaggtcgtaacagatgatggataaattattcttgcgcggatcgatatttttcagtttgcagatacgctcaatggggcgttccttcagcgcatgacatcctaatgcgtacaccgtgtctgtggggtagataatgatgcccccatcgttcagaatgtctactatgcgctgcaggtcttccggtcggttgtttttagaatataatttaagtaacatggcgttatttacgaagatttgacttcgtatgaacgcaaaaataagaaaattatttctttttctttcgcagttcttctgcaattcgatagtgaatggcagcttctatttcctttccgcttttttcgagtgcttcagcaaaatattcatgcgcaccggcatgctgtggcttcaggctggtagccttgtccaaatcggagagcgcttcttccgtttttccggtcagcagacgaagttttcctcggttgtatactgccttgaagtcctgtggccgtagttgtacggcatgattcaggcattcttcagcttcttccattcggttttcatcgaagaatgtcactccttttcgtacccaggcatccacatactccggatacagctccagggccttgtcatagttggcttgtgccgccctcgggtcgtgtgccttagtgatgcattcgtttcccatcaggtaatattcccgggcgtatttctgcaaattctgccgctgttgttgcatttgctccttcagcaatcggttttcttcctttaaccggttgatgatgcctaatttccggcggataaaacgctgtatcaacggtttttcaatgtcatatcggctgtggatggccttaaagaaagcttctaagaattcggcaaaattgcctttgtcgaaagcttttacagaggctacgtattgaatgtctgcctgtgcctgcttcatggccctctcaaatgtctggttgtcattgaagcgctgggcaaagctgacaatttccggtcggacaaacacatctgcgtgcgaaatccgccgcttcagctggatgccgtccaatgaggtgcagcggctcagagctacataagcctgtcctccggcaaaaactcctcccgtaaagtcgataactacccggttgaaagtcagcccctgactcttgtgtacggtgatggcccaggccagccggatggggtattgtgtaaatgtgcctaattcctcttcttctattttcttttccgtctcgttatatcggtagcggatgttgctccagctttccttgtgtacatcgaattcactcccgtcttccgttattacatagatggtaccgtcttccgaaagacctgataccgtaccgatggtaccgttcacccagcgtttttcctggtcgttcttgatgaaaatcacctgtgctcccggcttgatgaccagttccatcagggtagggaggctgctttccggaaattcaccatgtatttctccttttaatgtgaccggttcgcctggcagttcgttgagtttcttttcgttgatataatctacgttgtccctccgggtggccagcgtgatgtacaaatcattctcttccgggcaaggaggtgtcggcgtataacgggtgttcaatagttgtaaatccgcatttccggcagtattagtccggatatggtcgagcacgctgacgaatacctggtctgtttgccggtataccttggtgagttcgatggataccagctccatctcctggaacactttagctgagaagaaatacggattcggataaaaacggttcagaatctcccgttcgtcactttttactaccggctccagttggaatacgtcgcccactaacagcagctgttttccaccgaacggctcacgtaagttatgagagtacgtgcgaagcaccttgtcgataaagtcgatgatgtcggcccgcaccatggaaatttcatcgatgatgatgagttcgatgttctgaataagtttccggtggtcggaagaatatttcagaaaatctttcagttttcgcccctgaaacttcggatcatcgggcaggagtggatgaaacggaagcttgaaaaaactgtgcagggtactgccacccgcattgatagccgcaatacccgtaggagccagtactacatatttctttttggtatgctggcagacgtatttcagaaatgtagacttacccgttcccgcttttccggtcagaaagaccgattggcgggtatattggatgagtttcagtgcattctgaaattcggggttgtcggtatctatcagggtaggagtcatctgtcattgtgtttagagattcatgcaaagatacggacaaatgggaaataaaaaaagcggttagaagtctaaccgctttttcgtcagaatatttacgagaagcctttcggcatttatcagattcgtctttaaaatgctgaacttgtcagcgtcgcagttttatttgcgtctttcgtcattcagcattacataaccccagatcattggatctgcatttgcaatcttgtggaaaatgttttttacctttttcataattgttaccctttcttttttagttagtttaattaaatcttcttagcggacttcccagccggccgttgtacttgttaccttatttaccttgaaaactttttattggctttttcttttagcctttctttttacactgcaaatatagaccttttttctttacaaaatatgttttatagcatgtttttcttgtaaaaggccaatttgttgatgtaaatcaaatccggaggcagggttatttcttttcaattacattttcccctttctctcccgaaaaactcgtaactttgcagccgttttgtagaatacctatggcagcaagaatgaacaatcagtacgaagaacgcctgggaacggagcggatgcttcctctcattttcaaaatggctttaccggcagtggccgcgcagttcgtcaatctcctatataatatagtagaccgtatttatatcggtcatataccggaaatcgggacaaatgcattggcgggagtaggagtgaccacttccattgtaattctgatttcttctttttcggctatcgtgggggccggaggtgcgccgctggctgccatggcactgggacagggcgaccgggtgcgtgcggggaaattcttaggcaacggtttcatgctgctgattctgtttaccgtgctgacttcgctggtatcttatttgtttatggagcctattctgctgtttgcgggagcatctgccgttacacttccttacgcagaagattatctttcagtgtacttgctgggtactttgtttgtggaaatctctaccggactcaatacgttcatcaattcacaggggcgtcccaatattgcgatgtattccgtcttgattggggccttgctgaatattgtgcttgatccgatttttattttctggtttgatatgggcgtaaaaggagcggcactagccactattctttcgcaggcatgcagcgcctggtgggtgttaggctttctatgttccgaccgtgcctctttgcgtttgcaaaaatgttacctgaaattcgaccgccgtatcgtcggggggatgttggctttgggggtatctcccttcattatggctagtacagagagtctggtaggatttgtgttgaacggcagtctggagaaatttggcgatatatacgtaggagccctggctattttacagagtgccatgcagctggtcagtgtgccacttacaggatttgcccaaggttttgtgccggtggccagctacaactacggacatggtgaccgccagagggtgaaagactgtttccgcattgtactgacggtaatgttctctttcaattttgtcctgatgttgctgatgatttgtttccctacggtagtcgcctcggcatttacgagcgatccggagttaatagccaccgtagagcatgtgctgccgctcttcctggcaggaatgacaatctttggtttgcagcgcgcctgccagaatatgtttgtagcccttggtcaggcacggatttctatttttatagctttgctgcgtaaggttattttgctggtgcctcttgctctggtgctgcctcgcttctgtggcgtggaaggcgtatttatggccgaagcagtttcggatgctacggctgctatttgttgcacattgctcttcttctggcaattcccgaagatacttcgcaagatgcagaatctggtacagaactaattttacgattccgataggtaaattgcttgaaacacagagagataaagtggtaaatgcttaatcgtattctctgtttcacagtgtgggatacaaaaaccacactgtgggatacatatttcacactgtgaaatataaatcccgcagtgtgaaacagagaattcttcgaagcgttctgaattatgcttttcggaatttgtaattatatgtggggagaggtggaatttcctgatagaaattatcggctatgctataaatctttataactttatcctccaagtatatcgtagctatgattgaggtggcttaaaatacaaaaacgaatacggttgtgtttccgggctgcctagctcggtatgcaagttttatttattgaaaaccaagtcttataaatgaaaaatataatagagagtatcagaaagcaatatccggtgtccgatttgaccataaaggaacttgaatcctatttaacaccttgcagtttccctaaaaggtatcaacttataaaggaaggtatttattgtaagtatgcttattttatagagaagggtatcttaagagcctattgggtggtcgatggagaggaatacactacctcgttcggagcagagggatgtattgttttcagcatggatgaattatattacaacaaaaaaagtgaggaatatgtggaaacgctggaagaagtggaagcctacagaatcaatatacgtgacctcaaaaatcttatggaaaccaacttggagttatgcaactgggggagaatcatacatcagaatgaatacagacggttgcacaggagccataaagagaggttgtcattgccggcaaaggagcgttatgaggaatttcagaaacaatttccggaaatatgcaaaaaggtaaatctgaaatacattgcatcctatttaggaatcaccctttctactctcagcaggttgcgaagcaaaagacagtaatttgatttaggacaaatttttaatggatgagattccctatctttgcacgatgtaaatgtatagtataaatcctaatcagtttaatttatcccgatatgaatcatcgaatctcatcttcagcttttgcagatacaaaaccgcattatgaacttcttgacgggctaagaggggtggccgcactgcttgttgtgttctatcacattttcgaaggtttttcttttgctggaggaggtaccctcattactgtcattaatcatggttatctggccgtcgatttcttctttatactttcaggttttgtcatcggatatgcgtacgatgaccggtggaagaagaacttgacgttaaaaggcttctttaagcggagacttatccgactccatccgatgattattatgggggcgataatcggttgcattgctttctttgtgcaagggggagtgaaatgggatggtacacatgtagcgacctccgcggtcatgttggcactcttgcttgcaatgtgctttattccggcttatccgggagccgggtatgacgtacgcgggaacggagagatgttttccttgaacggaccgagctggtcattgttctttgaatatataggtaatatactttacgctcttttcattcatcgtttaagtaataaggcactgacagtattggtcatactgctcggtttggggctttcctggtttgctttgtttgatgtggtaggttatggcatgataggagtgggctggacgctcgatgggctgaacttttggggaggcatgctgagaatgctgtttcctttcacgttaggtatgctgatttcaagaaatttctgtccgttcaagattcgaggcgcattctggatttgcagcattatcctgttgggacttttctgtgtgccttatatcgaaggtaagtcaccggtatgcttgaatggcgtgttcgagatgatatgcattgcggtggtatttcctctattggtgtgtatgggggcatccggcaagacgacagacaagcagtcgaccgctatctgtaagttcctgggagatatatcttatccgctttatgccattcactatcctattatgtatgtattctattcatggcttattgagaaacagttgtatacgttggaagacacttggccggtggcagctgtcgtatatttcggaagtattgcattggcatacttgtgtctgaagctctatgatgaacccgtgagaaggtggcttggaaataagtttgtgaggtagtatggaaatatattagtaaatatgataggatgtataaatcccccttttaattagggattgtgtgcagaattactcgaccgttgttaattcattggtcgagtaatatttttatgtctctattgtacggtaataaagttttatgtgtattgaagcttatgtctgaagcttggaatttgaattgataatatcgaatttcttcctatatttgacgattttccacctttttttgattggctaattcgtatttttgtgtaaacaaaaaaggtgtatgctatgaataatgctgtaaaaaaacattttattgaactgttattttttatacttctagatttctttacagtttctctttgtgcaaaagattttaaaattttagatacctcaaatggattaccggataatactgtaaaatgttttacacaggatagtcggggatttatgtggttgggaacttttaatggcttatgtcgatttgatggggctgagttcgttatttataggcatgataagaatacttctaattctatagtggataatcatgtggaagcattgttgtcagttggtgattatttatgggtaggaacaaccaatggactttcttgttattcccagaaagaagatctgttttatgattgtgtttatttgtctccatctggtgagaaaaaaagaatagacgtagctattcgtaatattatttgttgtaatggtcttgtctttgttttaacaactatggatgagatttgggttcaaaaagaaggatatgtttttataccttgtgtatatggaaaaaaaatgtcttggcaagctattgcaaattataaggaaaatctatttttggcctatagtacagaaggtttatttttgattgatgcccaaaaacaagctatcgtaaaccagaaattgttagataaacatattctaagtggctgtatgatgtattatagtcagaatcagaaaactgtttatgtgggtgcggggattggatatgcaggtagggcctttaaaataaattccgaattggcagagattgtggaagaatcttttgcgttgaaagatataaaagcaattgtggattatcaggataaggtattatttggtctggatggtggaggaatagtggagttaaaggatggagaaatagtaaattatacatctcaaaattcgaatataagcagtgatgcagttcacgctttgtttgttgacaggagagattgcttatggataggaacttatcgtggaggtgtaaatttttactcatcttattacgattggttttatactttgaccaagaatgaagaaggcttatcccatgatattgtgactgcaatttatccggatggagataaactgtatttagggttagatggaggtggcttaaatatatatgataaaaagtctggttcattgactgtttattctcaacagaatagtactatttcggggaataatattttgtctatatgtgcagattcccagtatatatggatggcagtttatgagaagggattatgccgtttttcacgtactactcatacttttaaaaattatgatcttttttctatcgataagatttataatgcaaatcaggtgtgggatattcaacagggcaatgatgggaatatatggattataggttctgtagtttatttatttaatcctaagacagaatcttttacattggttgatggagtttatagtgcatcttccattttatttgatggcgattttgtatggattagttctacgcatacgggattatataaattggatcggaaaacaagaaagatatgtatgcattaccatgaaaaatcggagaaagtatcacttccttctaattttatccgctatatgtttatggattctaatcattctatatggttatcaacggagtctgccggactatatcggatggacgagcagaaagggaaaataatatcttatgcggagcgtatcgaacttcaaaataacaaagtggtgagtatagaagaagacggtgtggggtgtttatggttaggcacttataatggcttatataaatatgatccgaaacatgattcttttgttcattttgggaaaatggataatctgtgggctggacaatttaattatcatgcttgtgcacaagataatcggtttgtgtatatgggcgctacaaaaggtcttgtttggtttgaaccccaaaagattgtttatacgcatcagactagtcctgtttattttacagaattggagttattgaatcattcaggtagtaaagttcatttgctaggtatggaggggaaaagcgtttctttagcttataatcagaatttctttactttatttttttcagtgccagagatgttgaccccagataaagtccgtttctcgtgttatatgaaagggtttgaaaaaggttggcaggagattgggacgaaacggcaagtctcctatacaaatgtacctccaggaaaatatgtattttatgttaaatcgacagacagttctggaaaatggagtgataaaatgtcttgtttatatattgtcatcactcctccttggtggcaaacggggtgggcttggtgcttgtggatattgctcttatctggagctattgcaactgccttctggttttataaacatgaattgaatattaagcaccttgttcaattaaaagagatagaaaaagaaacagctcgtaatattaatgaagcaaaattacggttttatacgaatattacgcatgaattacgtacgcctatatttctgattacagctccattagaggaattaatgactgaaaaaaaacggatagtatcagttcctcgtacatatttgatgaatatgtatcgtaatgctatgaagctaagtaaattagttactcgcatgattgatctaagaaagttagagcaaggaaaactgaagttggatttacatacacagaatgtcgtatctttttgcaaagatcttgtaccagactacgaatctctatgtcagcaaaaaaatattatttttcattttttaccagcaaaaactattattcgattgaattttgatgcagaaaaattagaaataattcttactaatctagtttcaaatgcatttaaatatactccggaaggtggtaaagtggttcttgttattgatgagacatcagaaaatgtaatgttttcagttgaggataatggtattggtatagagaaagaatttcaggatatggtgtttgagcgtttttttcaggtagattcttctcaatcgattgcaatgggagatggtattgggctttcctttgtaaaatatttggttgaattacatggaggtgaagtacatttagaaagtgagttcgggaaagggtcaaaatttatgttttctattcccttgaaagatgaaaataaagaggagaaggtagaagaagtggaggttttaccggatgtggaaaaagaaaaatctttacttcttaatgcgcaacctatgtcgccaacagctactcatacacttttattaatagatgatgaacctgaaattttagaactgatggaacgttccttaattgaagattttaggatattgaaagcgaataatggaatggatggactgactgtggtaaggaaagaacttccagaccttattgtatgtgatgtaatgatgccgaaaatggacggaatggcttttctggaagccttgaaggaagataaagaattggcccatatcccgataatcatgttaacggcgaaaattgctgaggaggatcaaattgtagcttttgatagtggtgcggatgcttatttgacgaagcctgtttcattgaaatttttacgtaatagaatagattatttattggctcgtacggagtctgttgtaatggcaaatgctttggcgaagtcagaaaaaaactatacgaaagaggaacagcgttttttattaaaatgcaaggagactattgatgagcatttaatgaatccaaatcttggagtggtttttatggctgagaagttaggtatgagtcattcatctttttaccgtaagattaaatctgtgacaggaatgagcggaatggattttattaatgaatataaagtttttaaggccgtccaactatttaatggaggtgaaactaatgtaagttcagtttgtgtaaaatgtggttttaatgatataaagagtttccgtgatgcgtttaagaaaaaaatgaacatatcccccaaacaatatgtgatgcaactatccttattagaagatacttctcataaagggtgaatgtttctctttttacgctgaaaacctattattacctgtttttgacggatttcttcctcatttgggagcttatacattctacttttgtgcctagaaaaacatgttttttatttttgaacctattaatttaatattgttatgaacagatttcaatggcttagaaaaagtgtaatgtcatcttcaattacgcagacataaaatgctgattaatgttatgactgcatatataaagaatgcatgaataatatgatgtgtgaaatttaatttggttgctttgtaacttaaactatggtttatatgagaaacaaaaaatgtttgcttttgaatagaattggtatattcctttctatgataatgttggaaggtcttatgatacggcatgattaccttttggcttctgaatctttatcttataatgaaataaatttaataaaacaaagttcagaagtaaaagggcaagttgtcgatgtgaatggagagccaatcattggcgctagtgtaaaaataaaaaatacatctttaggtacaattactgacttgaatggtttttttatactaaaggatgaatctgcaaagaatttaataatttcatttattggatatgaaacaaaagaagttgcattgaaagggcaaacttttgtcaaggttgtattagcagaagatacagaggttttggatgaagttgtagtggtaggttatggaactcaaaagaaagtaaatttaacgggagcggttgctactttggattcaaaacaattagaaagtaaaccaattactagtgcctctcaaagtctggctggaaaagttgctggtgttcatattgcacaatcttcaggtattgcaggagatgatggtgcacaaattaccattcgtggattgggaaccttgaataatactgcacctcttattttaattgatggtgttatatcgccaagtatggatgtagtgaatcctgcagatattgagaatatttctgtattaaaagatgctgcttcggcctcaatatatggttctcaagcagctaatggggtaattcttgtgactacaaagaaaggaagcacagaaaatagagcagtttttaatgtgaatgctggattttctatatctcaaataaccaaacagagtaagcctcaaatggtcacagatacagagacttttatgcttttaatgaatgaggcacgtgtcaattcaggattaactcctgcattttctgaagaagtaatggagttgtaccgtacaccttcttatagagaggcatgttctacagattggtttgacgaaatctttagatctagttttactcaagagtataatattagtgcacatggaggaaacgataaaactaaattttatttttctttaggttatatggatcaaggatctattgtttcagatggtaattatgaacgaattacttctcgcttgacattagattcacaaattctgccaaaattgaacgttggggctgtaatggggtatacttatggtaatcaaagaactcccaatggtagtgtgaatgaggtctttgcacttgatataatgagagcttctcctttaaatccagcttataatgatgatgggtcgttggctcttcctgatagttattctttatcttatacgggacaagttcaaagtggtaatcccttggctggacttttatataatgagatacatcaaactcgtaatgatattattggcactgcttatttggactggaatattttgccaggacttcatttgactactatattgaatgctaatattcaggtttatgattataatgaatggaagggatgtccttcaacaaaaaactggcgttataaggaattattggcggatccttatttcaatggtacaatgagtgacctggaaaataatttttatgggaatgcaagtctaaagatgtcatcttctagaaactatcgaataaaccctcatgtacaattaaattatgagaagaattttggcaagcataacttgaaagctatggcagctgttagttatgagaagaatagtaataactattttgatgcataccgtggtaaatttatctctaactatattcatattttaggtgcaggtgatcctactacgaaagataattcaagtgctttatctaaatatgcaattttgtctcagtttggtcgtattaattatgactatgctgataaatatttatttgaatttaatatccgacgtgatggttcttctagatttggctctaactataaatatggtgttttcccttcattttctgctggatgggtgttaactcaggaggattttatgaagaatgttccattaattaacttttttaagttaagagcttcatgggggcaattgggaaatcagtatggtggagataattttccttatatggcaaagatagcttataatgcaaattatgtgtggggaaaaactgtagaaacaggggttacgccatctagctatggaaatcctgatttgcattgggaaacgacgaatgtaacaaacttaggctttaatttacatcttttggattcagaattgatttttgaaggagattattttattcgtaaaacaaaggatattttatttaatactccattaccttatgaaacgggttttagctcggtaatgactaatcttgctcaggtgcaaaataatggttttgaatttatggccacttaccaaaaaagatttaataattttaatatgtcaataagtggaaatacttcatatatacgaaataaagttatttcgttagatccaacattggttggtgaagcagataggcatataaatggaaatcaaataactacacgtgataatcctatcaattcatattatttagtgaagtggactggaaaaatctatcaaacacaagaagaagtagataatagccctcatgtgagtggggctggtcctggagatcttatttttgaagattttagcggtcctgacgggactcctgacggaactattgatgcttacgataggcaaattttaggaactgagtatccttcttggacttttggggcaaatttgtcatttggatataaaggattcgatttgagtgttgattttcaggggattgctgacgcatattcttatggaacttgcgaatattatacaccaactttccaaggttccaattttggacaattttgggtacagcgttggacacctgaacatcctagtgaaactgtaccgagagtgtgggtagataatggtcctaataatacttatgccaatacatattttctgatggatagaacatatctgcgtttgaaaaatttagtatttagctatacttttccacagaatatatgtaagagactgagagcaagccgtttgagggtgtatgcttctgcatcaaatttatttacttggacaaagaaaggatataagggatttgatccagaacggtctaatagtagtggagaacgtggaggaattcctcaagctacgacattcaaaatgggtattgatttgactttttaaatagaattgaaatatgaaaaagatatatttattagtactgggttttatgtcatgcttcttttatagttgcaatgattggattgagttggaaccggaggattctttggcaaaagagacattttttaatactcaagaggattttaatcaggctataacagggctttatgcaatacttcggcctacggatgcagatgctgttggaggtgcatattttgggaatctgtattgggaggtttgtgcggatgtttgtatgtggaagaacagttggacacaaccttggtttgatatttcacgaggagaattaaatgcagtgactggaaatgtagatcttgtgtataaaaatttgtactatgcaatttcatgggcgaatacaattaaggcagaaatagaggcaaaagctgataattttgatgaggattttgtaaagtatgtaacagggcaaataggttttgtaagggctttatgttatattcgtttgacaagtttatggggtgatgttcctttggttgataagatttatactcctgaggaatcaaaattgccaagaagtcctttttcagagattatggaaaaaattataattccagatcttacattggctgcaacaaacttagaagttactccttatgattctcgtgaagggattgcaacaaaacaagctgcaattggaatgaaggtaagagcttatttatatgcagaggattatgagaatacaattaagagtgcattggaattaatggaattggaaaagcaaaatccatctgaaattggtttcttggataattataaagacattttctcaaattcaaatgaagataataaagagattttatttgccttaaaatatactgcgggaggatataaacagggaagcacctttaatacaacgtttggtagtaagttaccaggactgccagaagccagtatgaatggttcttgggaaacagtttctgtattacctgaatttatagattcatatcctttaattgatggtaaaacagtggaagagggttcaagagcttatgatccggaacaaaaatgggcgaatagaggccctaggtttgaaagcacattttatattggtgattattcaatggttaatggccttttatatgaatcgtctgaatatgtatgcaatataagtgctcaatgcgcaaatgattatcctttaacaataaataaaggatatatgaatgaagatgataaaatagactggacaaatgaagatgagtctgattttattgttttacgttatacagatgtgttaatgatgtatgcagaggctaaaacaatgcttggacaaatagacgattctgtttatgacatattagataaggtaagagatagagccggtattgcacgtgtgcctcgaggacaatctcaatctgagatgatgaatacgatacagaatgaaagaaagtgggaatttgcttttgaaggattaagatattttgatattcgtcgttggggtattgctgatcaagtgataaatggaatcacatcggatgaaaaatatgattttggatctcataaagtgtttgtttctggaaagaatgaactttggcctattccgcaaagtgctattgatgcaaatccaaatctttctcctaataatcctgggtattaataaaattaatttattatgaaacagttgttatttatagtttttgtgtttattggaacctttgtatatgttggttgtaatgaagaagattatgctattaatagaatagcttcaccagagaatttgtctgctacacgtggggatacttctgtctttttaaaatgggataaggttgaaggaactgcattttatacattggttcgtggtttaaaagtaatagcagatagtttgtatgtagagtcttatgaagatgctttagcacctgatacattgactgaatatagagtttatgcagtggatgctatgggatggcgctcttctacttatgcctcagattctggatatttgggcattccaaatggaatcattccacgtgctccaataaaatttgaagcttcggtagatgatattagaggatgtgtattgtcgtggacaactgggcgttttgctacttcttataaattatataagaatgatgttttttatgcagatgtagttgaaaatcagtttattgattatgatgctacagatgttcccacagaatatacactttattcaaataattataatgggatttcacagactggaatttcggctactggaaacaaagcttatttatgtttggataattatgaaaaatatgaggatggttatgtaatacaaccttggactgaaatagctgaacgtacacaatattatacggagggaagccctatagtcgtagcgggggaagcatattcgggctcaaagcaattaataataaaagaaggtaagttacagattcttcatgattggggaggtgctttgtatgatggttattatgtgataagctttatggctcgaaaagaaaatggaagttttaatgtgtattcaacttttggaacaaatgaagtctattctaatgttggggaatggacaaagtttagttataaaacgggattaattaaggtaggagacacatttaatcttacaatagaatcaaaattagataatatgaatttattgatagatgatttgtccatatcttatatctggagtggcggcttctaatttgttataggtttatagagaaatgtgataagctatttattacatttctcttagctagtgtgttgatttgttttttatatagtgttatgagataccgttatattttatatctgctttcttcttttttaccgattgtcagtattgaagggtatgctgctgaaaccatagaacaaaaggaaacgtgtaagacaaactattctcaaagtttgacaataacccctgcaatatatccttatttggtagagccgaaagattatcctgaatattatagaaggccttatccctcgctatcgtggaaagattttggcaataagacccagtttgtagtggggcgtaacacccctatagattcaacagaggtagctgaggtaaaaggtgatgtatataggccaggactttcattgatgtgtgataagaacttcactcggagattgcaatttatgtcgaagaataatttctttgtgcataatataggtggatatggaccgggatctgctatgcctgtatatggtggatttggagaatgtattgttccgaagtggcagatagatcagattcagaggtatataggaaataagttcacgggttttgatgtaggagaacaagatggacgttttaattttacatatcggcatattatagaaccttatatacctgataaaaaacagcaatacttggcttcacaaccttattttgatcgggtagcaagtgatttaggaaactggtgcagtgcattaagtgtactttggtattggcatcccattttaaaagaaggatatactatgctggctggttcggagactcagaataagataactaacggacaggtacaatacatgcatttaaggggagcagggaagcaatatggcatattgtggtatggtgatgtatctgtttttgattcatggggatgcaaaatttatgatgataaaaatgggtttaaaaatggtggaagtttgtcgcttatgaagcgttcttattatactcaatatatgtataattctacaattttgagtatggaacatggatggtgtgaaggagcttgggccactaatcgtggaaaactttctcccattgggataatgcataatgattgcgtggattttgtacataaatatgggcagcctggagttatggttactcagattgctttattgaatgatttttattcaggttggatgcctgcttctcatattgcagcttcatttcgcgtttggaatggtatgccatattcctcaggagattatttgacggatgctcttgtcagcatgttttatccacattatgagcgaagtggatttttttatgatgaaactggggccatgtgcgcaactccttacggtgagaatgtagacgcgttattgagtgatgctcgtgtagaaacaatgaagcaatatccagtgatagtagctgctggtgatttgtttagtggaggaagagaattgactgataaaataaatgattatgtattacaaggaggaacctttgtggttacggctaaaaatgctgctcgtttttggccggaatggaaaattatagagaaaaatactttgttcccggcaggaactaaagtgaaagtaggaaatgaacaaatcgttgagcaggctgcatttagactatataaggctgatttgcctgagaatgcgcaaatcatggctaaggtgggaaaatttcctacggtttggtgtattccagtaggaaagggacgggtaattctgtcattgacagagtttggtttaaattctcaaccttatcgagtacaacctccttctagttggcatagaggggagtttaatacttatttggagcgtccttatcgtctgttgagccattttgaaacaatcttggatgaattattttcatctgtaaatttattttcggtaggtaaagatttagggtatatagtaaactatttaggtaaaggaaaatatcggcttgctgtgtataataatacgttgaaaagtcttccatttaaaatagaatcacatataggtgatatagaaacaataaatgaactttctacaggaaataagcttttcagttgtgccgggtattggcctcatgagatgaagggagaagtagaaggtaaagatgatgaatcacatatctatggaggggatattcgtctatttgatgtaacggtgaaaaatgaaaaaataaatgtgatgagaaaaataaatcaggtttcacccgtaacaggttcctacttggctaccgataatatgatgtacctgaaagaggtaattaggacaatgcctactttttttgattattttgatggagtggctgttgatgggagggctgttttgcaaatggatgataaggctttggcgcgccaaaatgagtggtatacgctacagtcacttgatatagctgcagatttgcgcagtggctttgattctggttattggacttttgatattcagaagtcagcttttcagcgtacaaaagatgacttaaatagaataagtaagaaattgcagttgctatacggaaaacattcattgttaattccttgtgcttataagaatcagtgtccagatgaaatgagggcatattataatatttgttttattgattctatttcggaaaactctaactggtcttatgggaagaatttcaggttattggattgttcaatactggaatgggatgatgtttatatggcaatgcgtgaaaggtgtgtaaataagcaattggatgtaacagtcgataaaaaagttttaccggttaacgaaaatcatattttgaccttggagcgttatgaaaaagatatacgaaaagctgtttcaggagtcgattgcttttttgatgcatttggtggtgtgtgtgtaacagctgaatatattgctaataaatctttggatgctttgctggaggagaaaaaatggtgggataagataggactttcggtcattgttagttttattgaagagattaatcattttcctggattgacattatgtgatgctgttcctgtatattatgaaagaagtatggattattataaggatgtgttgagtaaaatgggacatctaggactaaaaagagcactgtttactacgcaggctcctattgaagctaattactctgaacagcagatctacaataagatgaaagaatcgtttaagattttgtcagagtatgcaggacagagacaacttaaaattttattgactaatactcgttttagaatagctgcagacgtaaagcagcaaaaacaaatgttacagcaaattggtgtaagtgctaacatggggttggctgtgaatttgaatcatttgtcagagcaagagtattctcagtctatagacgatgccggacatttactggatgttgttatattaggaggagtgggatcaatggaacattcggaatatcttccaatagctgaaagtggaaaatcagcagataaactgaatcggttaaaggatgtattgctgattgaaaaggtatggccttttaccaatgaaagtatatataaagattgccaatatatgaattgggtgaaatagttaatggaatgtattatcagtaaaatttatgaattttatgaaggactttagaatattctcatgtcttttgatatggatatgtgcgtgtactttatatgcgaaggatttgcctcgtgaggaacttttaataaattcatgttggaaatactccaaaggagatcatgagcatgcagaacaagaagattttgatgatacttcttgggagaatgtaggacttcctcattctttcagtatcccttattttatgtcgaaagacttttatgttggctatggatggtataggaaacagatccagttaagtgcggcagatttgaagaggaaactttttctggagtttgacggggtgtttcaggaagctgaggtttttgtcaatggaagaatggcagggaaacatgtgggaggatatacggggttttctgtagatatttctccatggataaaaaagggaaagaacctgatagctgtaagagtgaacaatttatggaaaccggatgtggctccgagagctggggagcatgtgtttagtggaggtatttatagaaatgtgcgtctggtgaaaaaaggatattgctatatttcctggtatggtatgtttatcacaactcctgatttggcagaacagcaaggacgttattcaagagtaaagattgaaacggaaatatgcaatgagagtaataagagtggaatttatcgtttgcaaactaggattctggattgtaatggaaagaatgtagccacagtagagactacggaaacggtggctgccggtggaaagaaaatatttatgcagttgactaaaccggttgattatccggctttatggagcccgcagcatccgaatttatatacagctgtaagtttggtatatcacaatgatagattgattgattctttggaaacttcttttggctttcgctggtttgaatggacggctgataaaggatttttcttgaatggacatcatttttatattagaggagccaatgtacatcaggatcaggccggttggggagatgctgtaactgaagctgcaatgtacagggatgtaaatatgataaaagaggctggttttaatttaattcgaggatcgcattaccctcatgcgccagctttttcacaagcatgtgatgaaacaggacttttattctggtcggaagctccattttggggaattggaggatttaagccggatggctattggaacagcagcgcctatcctgtagaaaaaaagtatgagcaggcttttgaggagagtgctttgcagcaattgcgtgaaatgatacgtattcatcgtaatcatccttccattgtggcatggagtatgtgcaatgaagcattcttttctgccccggaagcaatgacgggagtacgtaggttactgaagcggatggtggatttggctcatcaactggatgctacaagaccagctgccgtgggaggagcacaacgtcctttagccgatgaaagaattgaccgtattggagaccttgccggatataatggagatggtgccacacagcctgattttcaaaatccgggtattcctaatctggtgtcagaatatggaagtgtaacggctgaccgtccgggtgaatacgttcctggatggagtgacttacaacgtgatgaaggttggaaaggacgttcatggcgcagtggacaggctatctggtgtggatttgaccatggtagtattgctggaagtgcgttgggaaaaatggggattgtggactatttccgtattccgaaacgttcctggtattggtatcggaatgaatatgcgggtattgcacctcctgaatggccggggaaagataatcctgcacgtttaaagttaaaagcaagtaagataaagggggtgaagactgatggtacagatgatgtacaactatggcttactgtttgtgatgcttcagggaaagcggtatcttctactcctacagtagatttgaaagttatttcaggtccgggtgaatttcctacaggacgatccattcgttttgaagaaggaagtgacatccgtatcatggacgggcaggctgccatctctttccgttcatattatgctgggaaaaccgtgattgaagcaagtgcagacggtttggaaaaatcacgaattgaaatagaatttgtgggagataatgtatatcgtgaaggagtaactccaattgtatcatatcgcccttatgttcgttttgtacgtgagcagggcatgagtgagttacagactttcggccggaataatccggtttttgccagcagcagtaaagaggggcatgcacccggtatggcggcagatgggaatcctgatacttattggaaagctgccaacggagatacttcaccttattggatactggatactgaaaagtttttggaattgaaggagatagaactcggttttctttcagggaaatctccgtcttattatatagtagaaatttcggatgataaagaaagctggaatacaatatgtgataatccacaaattgagaaagcagatacaactcatcggttagttcttgataagggcaaaaatacagggcgttttatacgtattaaatttgcagattggaaagaagctatcttgtcagaattgttagtaaaaggaactgtattataaataattgtggaatttatatttatgagaaaatttgtgtcgattttatgcggggttattacattttttatgttatcctgcaagcaagaatccactgttgaaatgaagctgtggtataaccgtccggcaacaaactggatgaagtctgctctaccgattggaaatggagagttaggggcaatgtttttgggcggaatagctcgtgaacagctacagtttaatgaaaaatccttgtggtctgggagtcaggaattgcgaggggcttatcagagttttggagatgtattccttgattttgaaggaattgattcttgtaaagtagagaattattatcgggaactttcattggatgaggcaataggtcgtgtaacattcgattggcaaggtgttacgtatgaacgtgagtattttgcaagtcacccggatagcatgattgtggcccgtttaatcacactgggcaatgaaggaaagttaagtttttcagtgactttgaaggatggccgtgagggggtgacacgatgcaaggataataccaccttattattgcagaataaactggatttactttcttacgaggctcagttaaaggttatgaatgagggaggcagcttgtttatagagggggacaggttggtggtgaagaatgcagatgccgtgacattattattgacgggggctacgaatttcagcctttcatcgccttcctacatagatgagacatctgaagaactgcatcttcgtatatctgaccggatttgtaaggcttcaataaaaggttatgaacagttgaaacagagtcacatgaaagattattgtcctttgtttcaacgtgtgaaacttgatttaactgaaactttaccggtgattcctacagatgaacttgtaaaattccataaagaaagtctttatctggatatgctttactttcagtatggccgttatctgatgttggcttcttcgcgcggcatggacttgcctagtaatttgcaaggaatatggaataatgataatactcctccatgggagtgcgacatccacagtaatattaatgtacaaatgaattattggcctgttgaaaattgtaatttgtccgaatgccatgctcctttcttgaattatatttttaaagaagctcttaaatcggatggaagctggcagaaggttgctcaggaagaaggacttagaggatgggcaattaaaacccaaagcaatatttttggctatacggactggaatataaatcggccagctaatgcctggtattgcatgcatttatggcaacattatctttatacacaggatgtgaactttttggttgaaaaagcatttcctgttatgcagcttacttgtgagtattggtttgatcgtttgaaagaagatgaaaatggcaaattggttgctcctgatgagtggtcaccggaacaaggaccgtgggaggatggtgtatcgtatgcccagcagttaatctggcaactgtttagtgaaacaactcaggccttacaagttttccaccaaaagggaatacaacagaatgaggcttttgagaaagaattgaaggacaaatttgctcgtttggataatggacttacaattggctcatggggacaaataaaagaatggaaatatgatacttggcaactggatactttaggaaaccagcatcgtcatctttctaatttaattgctctttatccgggtaatcaaatttcttattatagaacaccagaatatgctgaggcagcaaagcaaaccttgctatccagaggtgacttgggaacaggatggagtcgggcatggaagatagcttgctgggcccgtcttcaggatggagaccatgcttaccgtttgcttaaatctgcactgagtctttcttctttgactgtaataagtatggataacgacaaaggaggtgtatatgagaatttgttcgactctcaccctcctttccagattgatggtaatttcggagctactgctgggatggcagaaatgcttttacagagtcatcaaggttttattcagttgctccctgcgttacctgctgcatggcctgaagggtgtatagatgggttacgtgcagtaggggactttacttttaatttaaaatggaaacaacatgtacttcaggagtgtacattagtctctggttcaggaaatgaatgcacaatttatagtcctgatattgtgattcaaaaagtagaggctgcttcgggagaggaagttcctgttacagcgtctgataagggattatataccttccagacagagaagggggtagagtatcacgttatattgaaaaactaataataaaaattcctgaagaaattctttgtttgctttgtgaacaggaattcttcaggaatttttgttttagtatatagggcgggaaatatttcacgctttaaaaggcttgcggaatttacatccgtttttccactgagagcatccgtaggccgtctttcctttaataataatgcccgtgccgcatacaggacaggcttttcctaagatgctgtcatcggctggcaggttgtcttccttaggggcttcgggagtggctgctttcttgctggcccgtggcttgcggggagccgcttttttcttgggctcttcttcaccgtttttaggggcagctgcttttttcagcggaattttagggctgtcatcagtcgtaacggtcacacggcggttgctgttgtcacgcagtacgctgtagactatttcggtgaccatctgcttcaattcagctaagaaggtacctgcatcgtaactttttcgttcgatttcgcgcaatttcttttcccagataccggtcagttcggccgatttcaggagttcttcgtgaattagctgaatcagttctactccggtaggagtagcaatcaggtttttgcgttccttgcggatgtaatgccgtttgaacaaggtctcgataatggctgcacgggtagaagggcgaccgataccgttttctttcagggcatcccgaagttcatcattgtccaccagctttccggcagtttccatggcacgcagcagggtagcttcggtatagggacgaggcggctgtgtccatttctcgttgagcatcgggctatgcgggccgctttctcctttggtgaaagcaggcaatacgctttcttcctcgttttccttcccttcttccggaacgtccttggcaaagattatgcgccagccgggttccagaatctgctttccggttaccttgaactctatctggtctgcttcaccgatgacggtggtggtagaaaacttacagtcgggatagaacacagcggtgaagcggcgggcaatcaggtcgaacacccgtttttccatgtcgctgaggccttgcggttgtaccccggtggggatgatggcatggtggtcggtcaccttactgttatcgaatacttttttcgatttaatcagtggttttccgcttaatgccgtcgtgtaaacggcatagtctttcaagccctccagaattttagggcacttgggataaatgtcgtcactcaggaaagtggtatccacacgcggataagtagccaccttcttttcatataatgactggatgagctgcaaagtcatgtcggccgagtagctgaattttttattacattccacttgcaaagaggtcaggtcgaacaggcggggaggcgcttccgttcctttcttggagctgacttcggttacggtaaagtctacattccggatgcgttccagtaattcctttccggtctgttcgtcggtaatctgcggaataccacggttggcatcgggttgtgttttcttcttggccgaagggttctctttttctttttcagcctcttcagccagttcctcatcgctctttcgtacgatggccgagaacaccgtatcgcggtagaccgtcttcagttcccagtattgcttgggtacgaagtgttctatttcctgctgtctttttacaatcagggccagagtcggagtctgtactcgtccgatggaaagtacctgtttgttctgtccgtatttcaaggtgtatagtcgggtggcattcatgcccaaagtccagtcaccgatggcgcggctcagtccggcttcgtagagcggttggaactccgcctggtctttcaggttggcaaatccgtcgcgtatagcctcttccgtcagtgaggaaatccagagtcgtttgaccgggcatttggcaccggccttttgcattacccaccgctggatgagttctccttcctggccggcatccccgcagttgataatcatttcagcttcctgcatcagcttttcgatgatgtgaaactgcttttctattccgctgtcgtttatcagcttgattccgaagcggggaggaatcatgggcaggctgctcagactccagcttttccacgaaggagtatattcatgcggttcttttagggtacacagatgaccgaatgtccaggttacctggtatccgtttccttcaatgtatccttcttttcggtttttggctcccagcacatcagcgatgtcgcgtgccacgctgggtttttcggctatgcaaactatcatggtctttctttcaatacggagcaaaattacgtaaagttgcctgaatagaaaaataaaatctttatctttgggcagaaatgactgacaacctttcttttggcaaggtttttgctaaagaattagtataacatttaaatgaagaaattatgttgatttggattgtatttataggtattgcgattatcagttacctggttcaggcaaacctgaagagtaaatttgaaaaatattcccagatgccgttgaccaatggcatgacaggaaaggaagtggcggagaagatgctgcgtgacaatggtatttacgacgtgacggtgaccagtacatcgggtatgttgactgaccattataacccgatgaacaagacggtaaatttgagtgaaggggtttatggtagtgcgagtgtggctgctgcagctgtagcagctcacgagtgcggacatgcggtacagcatgcacggggatatgcgcctttgcgtatgcgttcggctttggtcccggtggtacagttttcttcttccatcgtatcttgggtgttgttagctggtattctgatggtcaactcttttcctcagctgctgcttatcggtatctgtctgtttgccatgaccacgttgttcagtttcattactcttccggtagaaattgatgcaagccgtcgtgcactggtatggttgagcagtgccggaattaccaatgcgtttaatcatcagcaggctacggatgccttgaagtcggctgcctatacgtatgtcgtagctgccttgggttcactggctacgctgatttactacgtaacgatttatatgaatcgtcgcgagtaagcatgaaatcctttcgttttgtatgcggaaggtagaaattttattcgtatttttgccccgttaatttaaagactgattcattatggcaacaaaaccaagtatacctaaaggaacaagagacttttcgccggtagaaatggcgaaacgtaactatatattcaacaccattcgcgaggtgttctatcgctacggctttcagcagatagagactccttccatggaaaacctgtctactttgatgggtaagtacggagaggaaggcgataagctgcttttcaagattcagaattcaggtgactatttttctggactgacagatgaagaactgttgagccgcaatgcagcaaaattggccagcaaattctgtgaaaaaggtttgcgatatgacctgacagttccttttgcgcgttacgtggtaatgcaccgtgatgaaatcactttcccgttcaagcgtttccagattcagccggtatggcgtgccgaccgtccgcagaagggacgttaccgtgaattctatcagtgtgatgccgatgtggtgggcagtaactctctgctgaatgaggtggaattggtacagatgattgatgccgtgttccagaagtttggtatccgtgtttccatcaagattaacaaccgtaagattctgacaggtattgccgaaattatcggagaagctgataagattgtagatattacagtagctatcgacaaactggataaaattggtttggacaatgtaaatgcggaactggcatcaaaaggtattccgcaggaagccattgataagttgcagccgattattctgttgagcggttcgaatgaagagaaaatagctacgttgaagaatgtgctggctgccagcgagactggcttgaagggagtagaagaaagtgaatttatcctgaagacgattgccggactgggtattcagtcggaagtagaactggatttgacattggctcgcggattgaactattatacgggtgctatctttgaagtgaaggcactggacgtacagattggtagtatcagtggaggtggccgttacgataacctgaccggtgtgttcggtatggaaggcatgtcgggagtgggtatctcattcggtgctgaccgtatttacgacgtactaaaccagttggatttgtatccgaaagaagcggtgaacggtacacagttgctgttcgtcaactttggcgaagctgaggctgcgtatgtattgccggtattggcacaggtacgtgcggctggtattcgtgcagaaatctacccggatgctgccaaaatgaagaaacagatgagctatgccaatgcaaagatggtaccgtttgtagccattgtgggtgaaaatgaaatgaaagaaggaaaagtcatgctgaagaatatgacaagcggcgaacagtcgctggttactccggacgaactggtagctgccatcaacggataagcgtgagcgttaatcataaataaaaaggacacaggtttcacggaagaagacggaagaggcagatgcttcggacttctgtttcgtgaaacctgtgtttttttataggtgtttcgaaaattagtagagaatatggaaattgtatatttggttgttggcgtgatagtaggaggattgctgggctatttatgggctgcgaggaagtccgtttctttgcggtcggagttacagatgaaccaacagcatgcccaggatttgctgaaggcggaaaaggaacgtgctgaattgctgacagagcagtatcggaaggatacggagaggctgcgtggacaggtcgatgaactttctgggaaatgggcagaggcaggtcgtgcactggctacatcacaggcagagcgtcgcaacctggaagaacggttggagaatcagaaggaagaagtggagaaattgcggaagcaactgaatacggagtttgagaatatggctaaccggattttccagcagaagacggaggcattcaaccggcttagttcagaaactttgagtaatttgttgaaaccttttggagagaatttgaaagaattcaagcatcaggtggaagaggtgtacgataaagaatccaagcaacgcttttctttggaagaccgtatcaaggaactgatgcagctgaacaaacagattagcgacgatgccaacaacctgactcgtgccttgaaaggagattccaagatgcagggaaactggggtgaaatgatattggagactatcttggaaaattccggtctgagggaaggggaagaatatttccgtcaggaattcttgaaagatgaacacggtgaaccgcttaaaaacgagttgggacagcggatgcagcctgatgtgctggtggtgtatccggataaccgtcaggtgattattgactcaaaagtatcgcttacggcatacgcaagctatgtggcctgtgaggatgccgtgcagcgtgaacagtacttgaaagcacatctggcttctgtgaaagcccacattgatgagttgagccggaaagattattccagctacaatgtgtcttcattggattttgtaatgatgttcgtgccgaacgagccggcttatttgttggccttgcaggccgatccggacatttggaattatgcttaccagaagaaggtcgtattgattagtccgaccaacctgattgcagcgcttcgattggccttggatttatggaagcgggagtatcaggtgaaaaatattcaggacatcatcaagcgaggaacggtgctttatgagaaactggtaggatttaccgagactttcgaaaagattggagattctttacaggcagcttccacggcttacaagaatgcgttggggcagctttcgcagggaaaaggcaacctgattcgtcaggcggatatgctgacggaattgggcatcacttcgaaaaagaggttctcctcccgtatccggcaggaagcggacaggggcacgacaccggtgactcctgcaagagatttattctcggaatcggaagaacaataaaaagaagaagctccatggccttgagttgagtgtaccatggagcttcttttttgtctcatattgagattaaagttttacagtgtattgcttggtagctcctgcataaatgcctgtttggctgaagtcggctgtgagcgcttgtttcttcttaccgattttcagttccacttgaatgggcgactgggtttgtcccgggtcggcaatatgcagattggccgattttgcgttgatgtcttttaccatcaatatgcatggcttgtctacggtaacactcaattctttatgtttgaaagtaccagcttcgaagaaagttaccatccagacattcagtttggtattccgaacagcctgtacttttgcattgttcgacagaatttcgatggcattctctttctgataggcttccatctcttgtgcggaagtttttcccggcactacaatgtaagcgtatgagccgtctttcggagccacaccgtgattgatacccaatgtgaagacatccctcttttcttcttttttcgatttgctggtgttgatgtcataccagcgtccgctctgtgtctgggctgtcaggaacacttcttctttctgtgggaagaagtagccgattttgtcatgcaatacccactgcggggcttgcaaggtataacttccgtttgctaaggtctcttctttacctcccttgtcaactaagatgccgtctttcaagaagcattggttgacagtggtgtgaaccggataagtggaagtggattgtataccagctcccagacataccacttcgttatcaaagaagtaccagcttttcttggctccggtgtttacttcaggattggtatccatgtaagcgtatgccgtagctccataaatactgtcggaaactcctcctgcgtatgtggaagtacctaacacgccccatgctttcggatccatcggtattttttctacttgaggagcggtagtacccggaatatggcaccagttccatactgggaagatattgaaatactcatcgcctgtttgtacaatgttggtacatccgtcggacatgaaataggttttcaggttttctttgttgccgtattcacatttcttcgtgcgtgtagaagccaaacgtacgtcaaagttatattgaggacgcacatgtaatgagtagtcaccacggaaataatgggtatgtgaagcggttacctgatagtcagcaggctgctttcggttcaggcgggcgatgatggctttgtattcatcggcatgagttggatcgatgtcaatcattcgctgggcataagtggtagtggttcgtttgttcagtaatcccggacggcttacactgcgtcctaccacgtcgaacgacatattctgaccgcgtacggtacggtaataagtctcgcgcatgaacttgctgagcagcttcactttctctttatccagttgatactgtgtgcccaatgcataggaagctacctgggtaacacctttaagaatttcatctccatagcctccgatgtaaagctgttctccatgttggaaataactgttgtcatgttggaatccttcttctgtggtatataccaccggattgaaaacgttgtcgatagctgtttttaaatcggcttcattctgtgtcagacaagaacggtaaatccagtgtagagcaatatctgtacggttggcacctgtccatttagccgggtctccgcctgtttcctgaatccgtttcaatatttttgtttccagttcttgtggaatctgtttttttccaatgcgcatttgaatgagcagcaccccgagtttctgtggttcggaaatctgattgtgccaccagttgtcactttcagaatctacgtcataccagtattctaatcctttgacaattttctgatataaatcttcgttctgatagtatttgttcttttcgttggtatatgcgtagacaaaatccgacaaacgttcaatgtgttgaatcggagtccagttggtcatctgggtatcatcataatcaatgtcgctaaatgagccgttttcctgaaacaaagctagatctttgtcaatggaaggatttttaatagttgtattccggattttttccataaacatttcgtagtcattgttctgttgattgggcatttgtgtaagaatggaagcccaacccgtagccattgtgcaggaaagtgcagcggctaaagtaagtgtttgcagaggtctgttcatatatttattatgttaggtttaggtggtaaagataattatttttcgatacatctccaataacggaagtttgtttgcgtgtaaggctggatgtcagaattgtcagtatgacggccaggactgtcaggttgtttatgtcagaatgtcagtcttttgttttggcacgcttttcgcagaaagataggtgctttaacgcatttgataaacgataaaatataaactaaattatagcattatgaacattaaaccattagcagacagagtcctgattcttccggctcctgcagaagaaaaaacaatcggtggtatcattattcctgacacagcgaaagaaaaaccgttgcagggtgaagtagtggcagttggccatggcactaaagacgaagaaatggtcttgaaagtaggtgatactgtattgtatggtaaatattctggtactgaaatcgaatacgaaggtgtgaagtatttgatgatgcgtcagagcgatgtactggcagttttgggataatttaggtaattaacgaatttaagattagaaaggaaattcactatggcaaaagatattctcttcaacattgacgctcgcgatcagttgaaaaaaggtgtagacgaactggctaatgcagtgaaagtaacactgggcccgaaaggtcgtaatgtaatcatcgaaaagaaattcggtgcccctcacattacaaaggatggtgtaactgtagcaaaagaagtggaattgagcgatccgttccagaacacaggtgctcagctggtaaaatctgtagcctctaagacaggtgatgatgcaggtgacggtacaactactgctactgtattggctcagtcaatcgtaggtgttggtttgaagaacgtaactgccggtgcaaatccgatggatttgaaacgtggtattgacaaggctgtggcaaaggttgtggaatctatcaaggctcagtctgaaactgtaggtgataactacgataagattgaacaggttgctacaatttctgcaaacaacgacccggttatcggtaagttgattgcagatgcaatgcgtaaagtttctaaagacggtgttatcactatcgaagaagctaagggtacagatactacaattggtgtggtagaaggtatgcagtttgaccgtggttacttgtctgcttactttgtaactgatactgaaaagatggaatgcgtgatggaacatccgtatatcctgatttacgataagaagatttctaacctgaaagatttcttgcctatcctggaaccggctgtacagagcggacgtcctttgttggttatcgcagaagatgtagacagcgaagcgttgactactttggtagttaaccgtctgcgtggtcagttgaagatttgtgctgtgaaggctccgggattcggcgaccgtcgtaaggctatgctggaagatattgccgtattgactggcggtgtagttatcagcgaagaaaaaggtttgaaactggaacaggctacactcgaaatgttgggtacttgcgacaaggtaactgtttctaaggaaaacactactatcgtaaacggtgcaggtcagaaagaattgattcaggaacgtatcaaccagattaaggctgaaatcaagaactctacttctgactacgataaggaaaaattgcaggaacgtctggctaaattgtcaggtggtgtagcagttctttacgtaggtgctgccagcgaagtagaaatgaaggaaaagaaagaccgtgtagatgatgccttgtgtgcaactcgtgccgctatcgaagaaggtatcgtaccgggtggtggtgtaacttacatccgtgccatcgatgcattggaaggcttgaaaggtgacaatgcagatgaaactacaggtatcgaaatcatcaagcgtgcaatcgaagaaccgcttcgtcagattgtagctaacgctggtaaggaaggtgcagttgtagtacagaaagtacgtgaaggtaaaggtgacttcggttacaatgctcgtacagatgtatacgaacacttgcatgctgccggtgtagttgatcctgcaaaggttactcgtgtagcattggaaaatgccgcttctatcgcaggtatgttcctgactacagaatgtgtcatcgtagaaaagaaggaagaaaaacctgaaatgccgatggctgctccgggaatgggtggcatgggcggtatgatgtaatcttcccctttcagatattaagcaaatcccagtcggaaatatttctggctgggatttttttgtgttagagagagagtaagagagaatcaatatccagagttctgcttcattcctggataagtatcgagtgcagtttgaggaatggggagatagaaatgtttgttcgggttgaatcctgtctgctcgataggtatgttcagcaaccggtaatatggataagcgcttccggttccttgcagcagattgatgtagtctttccattctgcaccttcgatagagaatgcctcgtttaagatgtttttaacttctgtgacttccatttctcttccggtttgagaataagcgatggcagccataaggtagacttcacgcagcagaactggatgaatgtagtcgcctccgggattaccgaaattgtctttatatcctccccaaataacttctttactttcaagattatttagagcctgtgggtctaaaacgaatgcgttggtattcaaaatatattggcattcttggatagcagcgtcgtaagctccagaaagtagggaaatctttgcaagtagggctctggctgctaattgtttctccgtgtcaaatgtatttactaaatcagtcagatagtaaatcaagtattcttgactttcctgtgtgtcattaggtatgagtttaccataatatccgaacaactggctttgaatgactcctaagtcaacggttagattccaggaggcttcccatccttctgcggtattgagtgaagtcagttgttccaggtattttttgcattcgtctattgtttgataagcaaaatcccagaaagtactggaggtatattcaatcatgttatagtcaaagcttttatcatataacaggctgaattccatgtttttgctttgagtaaggaatgtctcaaatgattgtttccatagtgcttccacttcaggcacattgatttcttcctcttttatctctgtcatgtagtgagtctttgtcagactgttttccggaagatctttgtaattcacgaagtaagtataagggtcactgcttactttatcatccacgtttatcaggccatctccgtttaagtcggcgtatattaaatttccgttttcgtccattcctgcgattaagaagccgtcgtgcaggttagagaaattttctttactaatcacataactcaatgtatcgctttgatgctgaataattgcttcaccgttttcattcgtggtgaaagtgccaagcaggtttcctcttccatcttttgcttcgatgttgactcctgcaagtgcttctcctgtaggtaacttggtgataatggtggttgcatgtaaaggaaccaaaggaacctctgctgtcggaatcacttcaggaacgacatacacatagctgtttccggccggaatagcattgccttcaatcttgactccattaatttgtacgtcattttcagtacgtgtcacataaagtgtttcgttactgatactggtcagggtactgccatctgttaaatcctctttggcatagcgtcctttgacgatgtgatttttgatggaagcggtatccaatacggcagcacggcttgcggtatttttgttttttacagcaaagacggtcagttcgtcttgtgtcaggtcggctacattcactttttccagtatttctacaaactggctgacttccggattgctttctttcagtacttctacaattttttgtacttcttcctgtcctttggaaggaggaggttccggagttgggttttcttcgtcactgcatgcattcaggaggcataaagagaagatgcctaacaaataataagctaatgttttcataacgtatttatttaaaggttattttattttttcgcaggcttccaagaatttagcagttgcttcttcgtattttttctttaagtcgtcagacaggttctttttccaatcggaaagggtgataccattttcttcacagcacttatcaatgttcttgctggtttctgccataattttcatggcttcttgcggattgggattttccttgattttggcagtcgcttcctcaatcaggttcatgattttgtcgtataccgggtctgaaactggttgagaaacagtttcctggacggcttcatcagaagtggatttttgtgcatttccggaacaagcttgagcggccagtagcataaagcaggcaagtcctgcataaatcagttttttcatggtagcagataatttaggtgaaacataaaataaaacaaagcaatacttatttcagcggaatactgagataaccttttgaaagggctttgatgaccaggtcggtggcgttcttggccccgaacttcaccatcaggtttttccggtgccattctactgtattctctgaaataaagagacattcggatatttcgtgggtactcattcctttggctatggctttcagcacgtccagttcccgaatggtgggagcggaatcaagcgtgtcgggcgtgtgtccgattttatctttttctttatagagtttctgaaactgcgggcaatagtattttttcccctttaaaacagcctgtaaggctttctgtatgtatttccctgcggaagatttgaataccacagcgtcaatgtcaggatgtttcagcttgttgacaatccagatttcctcgtgcatggtgctgacaataatcttggcctccggagatttctgtttaatctggtgaatcagttcaaaaccgtctatatcaggcaggtctaaatcgatgatatacagatgaattgaatgcagagcgagcaaactgcccagttgtgaacctgtttgggcagtatagatgtgttctatgccttcagtctgaagaagcaggctttttaggccttccagcacaagaggatggtcgtctacgatggctacattcaaattcatgcaatacttgtctttttatttgttaacaaaagtacgcaaccctcttgagataatgcccacgggaagccgtagtttttctataggaaaagcggaataatgatttgtattttttctgcttcaactgaaatgtgtcctttcattgccatcactctttctttcatagtttgtagcccgatacctttttctgaggtagagctgaatttcccgttgtgtgaaatggtgagttccagattcggaagtttccactccagtgtgagatggatttccgtggggaaggcatgtttgagcgcattgccggtagcctcctgaatgatgcggtagatgttcagacaataagtttccggaagtacagaccagtcgcattcttcgggaagagtggtcagggtgactttgcatgatgcagaggtcatccgttctgcatagttctgtaatacttgctttaaagtcgtttcctggaaggtaggaggaagcagttcgtgggatacacgtcggatgttctcccgactggtgcgcaggagttctttccacgattcgttgagtgtggaggcattcatctcgagtgcatacaggtcgttgcaaacgccgtcgtgaagttctttggccagacggttgcgttctttctcgagctctttcaggtaggcacgtgtggcattgcgttccgtatcgcgttgcaaagtttcgaattcacgcttttgtgcttctgcttctcttttctgccgttcgatacggagtttttgtttttggataaagtagagtgaaacgaaggccattatagccatcaggattaacagaaacgtaatcttcaattgcagattctgcttttccttttgacgcttttcctgcagcttctggtactccagctcctttttctgggtttcatatttcacggaaagctcttccagctggcgacttttttcttgcacgaacaacgaatcgctgagtgccttggccaattccagcgtgtggtaggcctgtggaaattcagatagttccttgtagacaagatgaaggttgttatacacgtcatattgcaggaacggataattttcgatgcccggcagttgcaggattttctgtgcagtctgagtggcagccttccattctttacgggtctgctggacatagaaaagtacctgatagtaattgacaagtgccatggtcgagttgaccttagcggcaagtgcattcgtttgttctaccagtttctggatttctgaggcagatgcctgggtgcggaacaaggtcagcaggtagtacgtgcgggcaccaagttccgtttctggctgttgcagttgctgggatagggcaatggctttagacagataggttttggcggcttcgtattcttcttgagtgatgaaaatggaagaacagacggtataaatctgtgtgcggaatgacttatcctgacatttatcggcctgcttaaccgcatctaaggcgtattttactgcctgagccggatttttcatatccaagtaaaccgtagccaagttgttgtataatgtggtgattgcctgtaaattttcttcgttgttaccggaaagaaggggcgcatattgcagggctttgtcgtaggcagcaattgcttcggtgagtttcccggacgagcgcaggtagactccttgtgaagtgtaacatgacatcatggcacaggtatccttttctgtcattgcaagttgaagagcttgttcgatagcccatagggcagaatctaccttacctgcctgataataagtatcggccgtttctgtcagtttctctacatccggcttgggagtgacggaaaaaagaaagccgggaatacaccataacaaaatgaagatgcagtttttcataggcggctgttattatgtgtggcttttgcaatgtagccaaaaagtttggattattctatagttttgtgtattttcatcaagttttttacgaattactaaaaataatatggtatgacgaaagaagaattgatgcgtaaggctattgagttgtcagtgaagaatgtagctgaaggtggcggtccttttggtgctgtcattgcaaagaacggtgagattgtggctacgggagtaaaccgtgtgacgccggattgcgacccgaccgcccatgcagaagtaagtgccatccgtgcggcagctaagaaactgggtacattcgatttgagtggttgtgagatatatacttcttgtgagccatgtcccatgtgcttaggtgcaatctattgggcacatctggaccgtatgtattatggaaataacaagcacgatgcagcagctatcggctttgacgatgcctttatttatgaggaactggatttgaaaccggcggaaagacgtctgccctcagaagttttgttgccggaagaagctattcgggcttttcaggactggactgaaaaaacagataaggtggaatactaaaatgattgggtaataaggctgtaatgcctttatattttttatgtttcccacggcggaaccgtacgtttttcataccggaaacgtagggtttcgctgtgggaaacttatgttttccttaggggaaacgtaataaggataagactgttttacagaaaagtatgtaacgttttctgtttacttttgttcttgttattgctgatttagaactgtagtgaattctcgctcaaaattaggcgtgaaaacgtttttccctaaattttgccgaatttcatccagtggccagaaacgtcctcctgccagttcttcactgggtgagataggtccgtcgaatacggttttgtgcgaaaataccagttctttttcccggtctgattcaaatacataatgtgtcagcagctgagaagtaaaatcggaaatgccgagttcctctccggcttcccgtttcagtgccatttccacgctttctcccaagtctacatgtcctcctacggaggtatcccattttcccggttggatgtctttccattccggacgtttttgcagatacaattctcctttgctgttgaatacatgcaagtggactaccgggtgcagcagcttgctgccgttgtggcattctcctcgggtagcgtcacctgtgatgtttccttcttcgtctacgatgggaaacatttcttcgctattgtctgtcattgtttcttctgtttggggttaggggataagtaaagatgaatctccgtagctcaggaagcggaaatcatgcgccagcgcgtaatcgtagatgggacgccagtttcctttcacaaaagcagagaccagtaacagcagggtgctttgcggctggtggaagttggtgaccattttcttgacgatgtggtaattgtatcccggtgcaatgataatctgtgtactggtgtgcagcgcatcgagctggttccggtccatgtaatcgagaatctgttgcagggcttctgtggtacttaactccggatgagtttcgtagggttgccattgctgtacgtgcagttcctgctggctggcatcgggatgctgtgacaaagtgacaccgatgtagtaaagactctccagtgtacggacagaagtggttcctaccgccacggcttcacctccatgtgccaggagtttctctatggttccacggtttacggagatgtattccgtatgcatttcgtggccttctatttcttcacttttcaccggtttgaaagtaccggctccaacgtgtagggtgacttcttccaaatccactcctttttctttgagagcgttcaatacgcgttccgtgaaatgcagaccggcagtcggggcggctacggaaccttttatcttcgagtaaacggtctggtaagtttccttgtcgctttcctgtgtttctctgttcaggtaaggaggaatgggcagttcgccgaagaactccagaatgtcggcaaaggttacttccggattgtcccaggtgaaatcaatccagtggctggtgccgtgacattctccacgagtagcagtcagcgtcagtgtctttccctttactgtcatttccttgtgcagaggcccttctttccatttcttcaggttgccaatcatgcatagccaggccgcatgctgggtttgctggaagttgagtacatagtcgttgggttcgatgggctccagacagaaaatctcaatcagcgcgccggtttccttgcggaagtgcagacgtgcctgaatgactttcgtgttgttgaaaatcatgagggtaccgggctccaggtagtctggaagggaggtgaaatgtgtttcactgatttgtccgtgctgatacaccagcagcttggactggtcgcggaccggcagcggaaatttagcgatgcgttcatccggcagcggatagttgtagtcgctaatctttatatgttttgtttcttccatgtcgtttattttttgcaaaagtacaacaaatagcagaatcctcctaacataataattttttcgtggacttccttttgcagactgctgaataatttccatattccgtggaaagtcgttacatttgtgagtgtaataaattgaagacagattatgaaaataggagataaagtacgcttcctgagtgaagtaggcggtggcattgtccggggatttcaaggaaaggacattgccttggtggaaggagaagatggttttgaaattcctatgctgattagggagtgtgtggtaatacagaccgacgattataacatcccgttaaaatctacagccaagccttctgcaccggaagttgaagaagaggaggaagaaaaagaaaagccgataacttatcgggcacctgaaatccgtggaaatgatgtactgaatgtatttctggcctacgtgccgcaggatgtaaagtccatatcctctactgcgtttgatgcctatctggtgaatgacagtaactattttattgattatttgtatctttcggcagaaggtaagagctggaccttacgcagccggggaacggtgaaaccgaacatgaagatgcacctggaagagtttgaaaagagtgcattgaatggcatggagcgtgtggccgtacagcttctggcttacaaagatgaccgtactttcttactgaaacaggcggtgaatcaggagttgcgcattgataccgtgaagttctacaagttgcataccttccagtcttctgacttttttgaggaaccggccttgatttatgagattgtcaaggatgatgaaacggtaaagcaggtatatgtttcggccgatgatatcaagaatgcactgttgcagaagaacgtgcaggacgtaccggcaaagttgcagaaaaagcagcatgtggtaaagaatgaaattgtggaggtcgacttgcatatccatgaactgctggatgatactaccggtatgggaaatgccgaaatgctgaattatcagctggatgtgttccgcaagacattggaggagtacaaacagaagaaagggcagcggattgtgtttatccatggcaagggagatggtgtattgcgtcgggctatcttggatgagctgaaacgcaaatacaagacttatcaatggcaggatgcttctttccgtgaatatggtttcggggctacaatggttacaatacattaaaagatatgggaacgttaaaagaaatgctgtcggccgaccgttttgcggctgagactggagtggaattactggaaatcagtccgggatatgccaaagctcggatgaaggtgactgaaaagcatctgaatgccggaggagtttgtcagggaggtgcattgtttacattggccgatttggcatttgccgctgtggccaatagccgtggacgtctgactttgtcactgaatgccaatatcacttttctacgtgctatcagtgagggctatgtatatgcagaggctaccgagacgttcaatcatggaagggtacctttcattgaggtgcgtttggtggatgagcaacagcaactgattgcggtgctgaccagttccggatatcggaaaagcgaagaattgaatatcgacgaactggaataaattcggagtataggagaatgtgtcaaacggagaatgctcgttactgaagtgggcattctccgtttgtattttggattagatttgttcaaaggcctgactcaggtcggcaagcaaatcttcaatgtgctcggtaccgatggaaagacggatggtagactgtgtgatgccttgttctgccaattcctggtcgttgagctgggagtgtgtcgtactggccgggtggatgaccaacgatttgacatcggctacattggccagcagggagaatatctccaggtggtcgatgaagcggtgcgcttctgtacgtctgccttggatttcaaacgtgaagatggagccggctcctttgggaaaatatttctgataaagggctgggaaagtgtgctcaggaagggaggggtggttgacctttttcactttaggatgatgctgcaggaagtctactaccttcagcgcattctctacgtggcgttctactctgagtgagagggtttccagtccttgcagaaggaggaaagcattaaacggactgatggcggctccggtatcgcgtaacagaatagcacgtattcgggtgatataggccgcaggacctgccacatcggcaaagcaaagtccgtgataacaggggtcggggcttgtcagttgggggaatttaccggaagctttccagtcgaatttgccggaatccacaatgatacctcctaatgacgtgccgtgtcctccgataaattttgtggcagaatgtatgacgatgtcggcaccatgttcaatggggcgtagcagataaggagtagcaaatgtgttgtcaatcagtaaaggaatttgatgacggtgagctatttccgcaatgcgggcaatgtcgacaagcgtgcagtttggatttcctaaactttcaatgaataccgctttggtattgggctggatggcctgctccacgtttgccgcttcttctgcgtctacaaaagtggtgtgtatcccacggctggggaaagtatgtgccagcaggttgtaagttcctccataaatggtacgggccgatacaatatggtcaccggtgcgcgtaatattttcaaacgcataactgatggcagccgctccggaggctacggccaaggcagctactcctccttccaatgcagcgactcgctgttccagtacactttgggtgggattggtcagtcggccatagatgtttccgctgtcttccagactgaaacgggctgcggcatgggctgagtcatgaaagacgtacgaagtcgtctgatagatggggactgctcgtgcatcggtcgtcggatcgggattttcttgtcccacatgtaactggagggtttcgaagtgtagcttagttctatccatagtcgtaagtgtgtaaaagtgattaaatgatactgcaaaagtagtttgtatggttatatcgtccaatatttgatgaaaatatggagaattgttctatataatgatggttcgaaagaaaaaacttgtagatttgctgtcgtaaaacaactcataatagaataatattcttatgacagaaaaactggataaagtggatttgcagattctccgtacgttgcaggagaatgcccggttgaccactaaagagctggcggcacaggttagcttgtcgtctactcctgtgtttgagcggttgaaaaggttggagagggaaggatacatcaagaagtacattgctgtgctggatgccgataaactgaatcagggatttgtggtattctgcaatgtcaaattgcgtcggatgaataaagacatagctatggagttcacccgtatcattcagaacattccggaggtgacggagtgctataacatttccggcagttacgattatctgctgaaaattcatgctccgaacatgaaatattaccaggagtttattattaatgtattgggaacaattgacagtctgggttcgctggaaagtatgtttgtcatggatgaagtgaagcatgactatggactgcacatataggagcggaaaatcattttctgtgtatttattccataaatagaatagaacatagaatattattctaattctatctgcctttaatgggaaaaacagtccgttttttctaaatatcttccgattgttggtggatagcacttttgcttgtatctttgccgacaaattatacaaatgcactatgaaagtaatagatttgataaagaatagtaaggaacccgtgttttcctttgagattttgccaccgttaaagggaaacagtatacaaaaagtatatcacatcattgataagttgagggagtttgaccctaaatacatcaacatcacttcacatcacagtgagatagtgtatttgccgcagcccgatggaaacctgaagaagactacggtacgcaagcgccccggaacggtagccattgccgcagccattcagaataagtatggcattcaggcggtgcctcatatcatctgtaagggatttacgaaggaggaaacggaatatgccttgctcgacctgaatttcttaggcattaacaacttgttgttgctgagaggagattctaagccgctggacattgcagaaaaagatttgtgtctgtaccatgagcatgccaccgatttgcaggaacaggtaaaccgtttcaatcagggcattggactggatggttccaagatagaaggaattgaaactcctttctcttacggtatggcttgttatccggaaaagcatgaagaagctcccaatatggaatccgacctgttctacttgaaagaaaaggtacgcaacggggccgattatgtggtgacacagatgtttttcgacaacgagaaatactatgctttcgtagaacgttgccgtcaggaaggcattgaggtacccattattccgggaatcaagcctgtagtatttaagaatcagttgaatgtattgcctaaagtgttccgcacggacattcctgaagcctttgcttctgaacttcgtaaatgtacgacggacgaagaagtgaaagcagtaggtgtggaatggtgcaaggcacagtgtaaggatttgctggcacacggagctccgggcctgcacttttacacattcatggcatccgacagtgtatataaggtagccaaagaggtgtattaacctctttgactttttacatcgcaatccttcttaaccggatacgcaggttgaataattcagcatctgtgtgcggggaagagggattgtgtggttttatagtgaggctatgctcttttccgttcaccgcatccggaatgatgaaatcctgacggtaagctttctgttcctcggcagggcgcagcaaataagccgcttcgtcttcaaaacggttatagctgcgaaggattacctgattctttcctttcttcagtggaagaatcactttttccgtacggaactttgtgcgatacggattcagatgcttggctatcagttttccgttcaggtagacctccattccatttccggcaccaatttccgccagaatatgctgtgaacgcggagagtctatttctcgcatcacataatagctggatagaatcggacaggaaaccttgtcactgtctttatctgttttggtccaggttttaccggatacaggtgcatgctgtaagtctgcatccagtttctctgccgaatggaacactccgctgccgggaccacatacgtaggtttctccccaggtagtacctgaaaaagcagtttcttttatctcttttcctttatccagtgttacggagtaggtctttccatccaatatcaggtctatttttcttcctgcttcctgtgaagtgtagataatctccaattgtttcaacaaaagttgttcgagattccagctgtagcccgtaatgctgcggtagttcgtatagtaatcaaaacaggagtaactgtattgcggcgtagcgttgcgaggagtaagtacggcatttctgatggtctttccagggaacggttcaatctttttatcgaaggaaagagttaatacgtgtatgtgtttatctttgtaggctgaggccggtacggtcaatactacttcgtcaccatattgcaggtaagtagccattttcccgtctcctttctgcagaagatagccgggtatttgcagggtgatttttccatctgccggatatttcccagagagaaacaagtataggtgattgtctttgcgtgttacttctccccatgtaaactcttcctggaaaggagaagcttccgtctgatatacagcgtagccatagcgggaaagccagtcgcccacctgttccaacacttctttctcaaagtcaactactgctccgtttcccttcggacctatgttcagcaggtaatttcctcctctggaaaccacattaatcaggctccgagtcttttcgcgtaccttattttctatacatccgcggtcctgccatgctctgtatccccaggtctcatcgaacatggatgcggcactttgccagggagcatgaagggttttgtccggatagtcattgtctgccattacgcagaaatcataccaatcgttgcccaggcgtccgctcaccatgcagtcgggctggtattggtgtacgagttcatacagttccttactttgtgccggagtatttgctcccatatcaaaccagagttcggaaatctttccataattggtaaggagttccttcagttgagcttttgaaaaagcatggtgtgcttctgtaataaagtcagcgttatggggtgacatgggcgatgcatacggatagtgccagtcgataagcgaatagtacagtccgaaccgcagtccatgacggcgggtagcttctgatatttctttcacgaaatcccgtttgcatggagtcgcatcgtatgagttgaaagaagtagtagccgttttgaacaggcagaagccgtcatggtgtttgctggtcaggataatggaatgcattcccgccttttttgccagtacagcaatggagtcagcattaaactgtgtcggattaaactggccggcaattttttcgtagtctttcttggaaattggggcaaaagcctgaatctgttcactgtatccattcttcacctgtttaccctgccataccccgcctaattgtgagtaaagtccgaagtggataaacatggaatatttgtctccgtgccattggcggaaggcttcttgagatacctggccttttgctcccaggcctatcacacacatcaatagaatgattaacagttttttcatggcttcttatttatgctctttaagagcaaagataacgagttctttgtttttataccgcttttttatgtaattttgcagccgattttaaaaaccattaaaagtacgttaaattaaaatgaaaaaattatttctttttgcgtttattcttctttctgtatgcgcaggaaaagtgatggctcagaacattcagttgcattatgacttggggcgtgccttgtataaatcattggacgaacgtccgtgggtgactacaacggtcgagatgttcaaggcagacaagtggggtagcacttatttctttgtcgatatggattatacagacaaaggagtgtcatctgcttattgggaaatcagccgtgaactgaaattctggaaggctcctgtttctgcacatgtagaatacaacggaggtttgaattatatcaacaatgccttcttgggaggtgctacctactcatggaacagtaatgatttttccaaggtattcggcgtacaggtgctgtataaatatattcagaagaatgaaaaaccgcataactttcagttgacgggtacatggaccctgaatttctgtaaggaaaaatttactttcagcggatttgcggatttctggcgtgagaaacattttgatgcagatggaaacaaccacgactttgtattcatcagtgaaccgcagttctgggtaaacctgaataagtttaagcatgtaaacaaagacttgaacctgagcgtaggtacagaatgggaattgagtacggattttgccgatcgtaacggattctacttcatcccgacactggccatgaagtggtctttctaaaccggttgaatcatttaaagcaattataaaatgaaaatgctggaaaaattattcggttttaaccctcgtgagacgcgtgtgcgtacggaaatcttggccggaatcacgacctttctgaccatggcctatattttggctgtcaatcccaacattctggcggctacaggtatggacaagggagcgcttttcacaacaacagtcatcgcttcggcttttgctacattgttgatggccttttatgccaaattgcctttcggactggcaccgggaatggggttgaatgcgttttttgcctataccgtttgtcttacgctgggctatacctggcagtttgctctgactgccgtacttttggaaggaatcatattcattctgctgacggttaccaatttgcgtgaaaaaatcgtagatgcgttgcccttgagccttcgcaatgccattggtgcaggtatcggtttgttcattgcgttcatcggtttgcagaatgccggtatcattgtgaataacgatgcgactttgatttcattgggaaatattacttctggttcggccttgctgggcattatcggcctgctgattacttccatcttgctggtgaagaaagtccgtggagccttgctgataggaatcttgctgactactgttatcggtattcctatgggattgacgcatctggatggcgtgttgagcactcctccttctatcgaacccattttcttccagttccagtgggagcatatctttacaaaggaaatggtgattgtagtgtttactttcctgtttgtagatatgtttgataccatcggtacgttggtcggagtgactacaaaggccggaatggtgacaaaagatggaaagattcctcacctgaagcaagcctttttggtggatgccatcggaacaacagccggtgccatgctgggtaccagtaccattaccaccttcgtggaaagtgcttccggagtgggcgaaggcggacgtagtggactgacttcctttgttacggcagtgtgcttccttctgtcattgtttttggctccgttctttttggcagtaccgggtgcagctacggctcccgtattgattctggtaggtctgatgatgatgtcttctgtgaagaaagtcgattttatggattactcagaagccattccggcgtttatctgtatcatctttatgcctttggcttacagcatctccgatggaatcgtgttgggaatgatcagctacgtcctgattaatctgttgtgcggacataccaagaagtttacaccggccatgtatattctggccttcatctttgtctttaagttcttcctgtaagcttttcattctattggaatttgttgcggaaatgcctgagtagttactgcgggcatttccgctttttttctccctgaaggccgtttttccttttctttcaaactgtagtgtactaaataagttgacacaatttatttagtaacatgcgtaaaaatcgaaagtattcaaaggcagaatgtct

SEQ ID NO: 3768 - DNA, 29582 bp, Unknown
  gut microbiota DNA sequence
ccatatcaacaccttcagtaatgtcgctaataggcattacgagatgtaccctcggattcttatatacaccgagagctgattgcagggttcctttgtcggcaaatacggggtcaataagaatggtatgtcctgcatagttgattttcaaggtggcactgcgtaccaaccgaataattgctttttcgttcatgatgttatgttttgtattatttttcgggtacaaagttcgaaaggatatcccaatgtctctatgccttaaaaacaggaatatatgccattttgataaaagaatgatgtatatttgcagaaagcaaaaaacaagagtgatgaaagctataatcaatcccgaaagacttgtaagcgttccgttcaataaaacgcaatgtggcgtagacttctacattaacacaggcgaaagcaaggacatctgtggtgtcttgaccgagcataaggcgtttaagacagattttttcagcttctatttctttcgtcgtgccaatggatatttgttgctgaacttccgaaaagtggagttacgggatggtatggtgctgcttttgtcgccgcaccagcaacaggaatggcacgtgaacgaggtagaactagattacacttttcttattttccgcgaagactttatgcgcacgttcattgctgacaagttcttcgtatatcggctgttgtattattatcagactgatacaccgccctacttgtttgccgagccggaggagctgacggaatatatgcgcctcttaaaaaagataaaacaagaactacaacatcctgtggtagacacttacaacctcattgtgtcagtgctttattatctactggtaattatcaaccgggcatacgctcaaacttatcgtctacctgtcgaagtgccaaaaaacaattacgcattcaaattcaaggacttactcgaaaaacatatccgaacgacacagcgcgttcaagaatatgctgatatgcttcgggtaagtcgtatcaccttgaataattctgtcatggcgcaatttggtgtatcagccattcacttactcaagcaacgtcttttggaagagctgaaaaatgagctactgttctccaatctgaatgtgagccaactggcagacgagttccacttttccgaccccagtcacctcatgcgttttttcaaaaaagaaacaggcaagacttttacccaatatctaatgaattacaaaagaggaatatatgaatagaaatttcatatttggcaaatgaattccatatttaagatatttatttttttgaataactatatttttcgtcataaaggttcattctgccagtccatagaaataccaatcgctttgtaattgacattcttttgaagaatcttaaaaaatacaaaaacacccaattttacattcttgggtgtaaaaaagggtgtaaatctcgcaaatgcttgatttacaccctttattgcggagagacagggattcgaaccccgggtacctcgcagtacaacggttttcaagaccgccgcaatcgaccactctgccacctctccaaaactcatcttgagagttgccttgtttttcaaaggcggtgcaaaggtacgcaaagaattttgttttccaaatttttggaagaaaaaatctatccgtatcctttattttttcttttccggacctttctggcagtgcttaaagccctttagcagttcccggtggaaacgcatttccgctttttgcaacagatagattttcttggccggaaggaattgtttgtatttccgcacatattccagctccagttcgtcggctgcaatacgtgcctgaatcacatcttccacaattttcccatattccgtttccgtggtgttgggattcttgccttgacgcagtttctgccacgcctctttgttgtacgcctgcttcttgtcttgcagttcaaaatagagagggaagaatttttgtgcttcgtcgttgctcagtcccgcctgctgaatgaaaaattctttctggcggttgcggaattcttctttgctgaatttggtattctgtgcctgaatgccgctcacacacaagatgagcaggagagtcagggcataaaaagttctttttatcatggttggtttatttataaatttccgtatctgcatcagtgagatactcgtatagagtatagtcgtccatcatggtctggtcgacaatggggtcgatgtattcatcgggcacttctgaaaattccatgtcacccatagtgccggcggcaggcgattgtgcttctttttcacccacgaacatccgcacgctgagcatcagaccgcagaacatggcagccatgtacacccaaggtttgacgcgtgcccacagcgtgagctgaggtgcaggctgtatttctcgttccggaagcttgtccatcagctgttccgtgaagttagcaaagtaaccttcaggcactgtgaacgggttctcggttccacatctctttaataagtcagtttcttcctttttcatattgttgcctcctttggaagttagattcgaatttgtaaaaaaggtttaatcatgctggtgaaaaaaatcttctatttttttgacggcatgatggtaggatgccttcagtgcgcctacgctggtgcctaagatttccgacatgtcctcgtatttcatttcctggaaatatttcaggttgaagatgatgcgctgtttctcgggcagttgcaggatggccttctgaaaaagccgttgcgtttcgtcgccgttaaagtaagggtcgctttccagcttgtttatcagagcggcatcggcatcgtcgatggacagctggttttcggcgcgctgcttgttcaggaagttcaggcattcgttgaaggcgatgcggtagagccacgtggaaagcttggcatctccccggaaatagtccaggttggtccaggccttgatgaacgtgttctgcaacaagtcgttggcatcgtcgtgcgaaaccaccatgcgtcgtatctgccagtacagctgttcgctgtaggccttcacaatccgttcgaacgctttctgctgggtcgacgggtcctgaagcatcagtatggtttctttttcgttataattgttcatggcgtgtgcgggttcgtcattgttaggtaagacgacaatccgttggttcggtttaatagggttagttttctttaacttctcagagtgagattttcagtccctcgtcggcggccagtgtgtcggggaagatggcttgggcctcttcgagcagggccttctcgtcttcgtagcgggcagagaagtgcccgatgagcagacgcttcacctgtgcgtccttggcaatccgggcagcctgtgcggcggtggagtgcagggtctgtttggcgcggacggcttcgctttcggtaaaggtagcttcatggaacagcaaatccactccagccacttgtgctgcgatgcggggcaggtagaccgtatccgagcaataggcatacgcgcggggagggtcggagggagtggtcagttctgagttgggaatcaccctgccgtcttccagtgtgtagtcctcgccgttcttgatgcggttcatcatgcagatgggaatgccgtagaagtcaatcatgtcgcgccggatgtggttcggtgtcggcttctcgcggaagagaaaaccgcaggtgggcagacgatgacgcaggggaatggtttccacgctgacggaacggtcgtcgtaaatgaccgtacgttcgccggggttgaaggggtggaacaccacctgatagggcatccccttgcagaagaattccagttgaggttccagcaggcgttgcaggtcggcatgggcatgaatgtggaggtcggcggtacgttccagcatgccgaaggtagaaatcagtcccatcaggccgaagcagtggtcgccgtggaggtgagaaatgaagatgtggttcagccggctgaacttcagtttggcgcggcggagctgcacctgtgccccttcgccgcagtcaatcatgaacagcttctcgcggatgttaagcacctgcgaggtcgcctgatggcgggtagtgggcagggccgaaccgcatcccaggatgtgtatgttgaatttttccattcttatgattcaaattgggtgtttcgcatgtcacccgtctcggcgtacgctatatgcatcttgaaggcgttgcgcagcgacatcggcgtgtggcaggactttccttccgaaagtttcaggtagtcccacagcagttgcttgtagtccggatgcgcgcagttttcaatgatgcagcgggcacgttgcgaaggcgatttgccacgcaagtcggccacgccttgttccgtcacgaggatgcgtacgtcgtgttccgtactgtccacgtgggatacttggggcacgatggacgaaatcagtccgtccttggccaccgacggggtggtaaagatagacaaatatgcgtttctggcaaaatctcccgagcctccaattccattcataattttgctgcccgatacatgcgtgctgttcacgttgccgaaaatgtccgcttcaagggccgtgtttaccgcaatgatacccagacggcgaatcatctccgggtggttggtgatttcctgcgggcgcagcaggatgcgttctcggaagtcgtcgatgtgctcgtacatcgtgtccagacggtcttccgacaaggtgagcgaactgccggcagcaaagcggatacggtctttcatcatcaggtcaatgacggagttctgtattacctccgtaaacatggagaaagccggaaggttcgggtcgtcacccagcgcacccagtaccgcattggcaatgttgcccacacccgactgcaggggcaggaactccttggggatggccccgttcttccattcgcgcagcaggaaggcagccacgttatgtccgatttgcagggttgtttcattttgcggtgtaaaggccgcgatgtggtcgcgggcattcgtgcgtaccactcccgtaatctttttcgggtcgattttcacgctgatgtgtccggcgcggtcgttcacgtgatacaccggaatttctgtccggtaaggcgggttggccggaatatagatgtcgtgcatgccggtaagttttcccgtatgcgcttcattcagctcgatgataacccgttcggccacctggagcagggtaggcgagatacctacggaagtgctcaggatgatttctccgtcgtccgtcaggtcggaagcttctacgatggctacgtggattttacccagaaaaccgtagcgcacgtcctgtccgatttgcgacaggtggaggtcaaagtactgcacctcgtgctggttgatggattcgcgcatgtccttgttcgactggaaaggcgtacggaacgatacggcgtgcgccttgaccagcgcgctgtccacctgacagcccgtggcaccgcccgtgataaggcctaccttgaattctttcccctgtgcatgctgtgcttctgcgtaggcagccagtgcttccggcacggctttcggtgtacctaccgatgaaaaaccgccgatgccgacggtatccccatgatgaatggtggcagcggcttcggctgccgtaataaatgcgtatgtcattgttgtaactgctgttcttttgttaggtaatagtggagcaaaattagaatttgtaattcagataatcaatatttatgacattttttctgcataaatgctgcaaaaaggccctttatgcgtaagttaatcgaatatttatactgtttgggataaaaaactgcgcaaaaagactcttcgaaacacaattacttttatttttgtgaggatttaccacgaaaacgtgatagaaagaatataataactaactaaaattgcttttactgtgaatatgttgagaaaactcaggctcacgctggggatgctgtgcctggtattcgtgacgctgttgttcgtcgatttcacgggcgtgcttcatgcatggctcggctggatggcgaagattcagttccttccggctctgttggcgctgaacgccggagtaatcgtgtgtttgatattgctcacgctggtagcgggcagagtgtactgttcggtcatttgtccgttgggcgtgtttcaggacgtggtggcccgtctgggccggggacgcaagaagatgccctacacgtattccaagccgaaaagctggctgcgctacggtgtgctggcagtgttcgtgctggcgatgctgttgggtgtgcatgccctggtagccttgctcgatccgtatgccgtgtacggccgtgcggcacacagctttctgcaacctttgtggatgtggggaaacaacctgctggcttctatggccgaacgcatggacagctatgccttctattcggtagatgtctggctcaagagtctgccggtgctgatagtggcagccgtcatgctggtagtggtagtggtactggcggcacgcaatggacgtacctattgtaataccatctgtccggtgggcaccatgctgggattcttctcccgctttgccttgttccgcatcacgattgacaaggagaaatgcaacggctgtacgctttgcgcccgcaattgcaaggccgcctgcatcgatgtgaagaaccatgcgatagacggcagccgctgtgtggcttgcatggactgtctggacaaatgtcataggggagccattggctatcggtttgcctacggaaagaaagccgaaaaggcagaaactccggcaccggaaacagccgaccgtacctccggacgacgcgagttcctggccggttccttgctgctggccggttcggtgctgaaagcacaggtcgccaagaaggccgaagccatcaagatggacggcggactggccgacatcgtggacaagaaagaaccggtacgccaaactccgattgtgcctccgggcgcacgcggactccgccatctgcagtcacattgcacggcctgccagctttgcgtgtcggcttgtccgaacgaagtgctccgtccttctcattcgctggatactttcatgcagccttacatgtcgtacgaacgcggctactgccgtccggagtgtacgcgctgttccgaagtatgtcccgccggagccattctgaaaattgacaaggcagagaagtcttccatccagattggtcatgccgtgtgggtaaaagatttgtgtatcccacttaccgacaagcaggagtgcggcaattgcgcccgccattgtccggtgaacgccatcaccatggtcccgtccgacccgtcgaaccccgattcactgaagattccggcagtgaacgaagcacgctgcatcggttgcggagcctgcgagaacctgtgtccggcccgtccgctgagtgccatctacgtggaaggccatgaacgccatcgtgtactttaatcggattgtcttacctttatatatagaaagagaatggacgagaaaaaacagatgaatcgaagagatttccttaaaatagtcggcatcagtacggtgggagccacagcggctttctacggttgtacgcccgacaagaaaaaagccggcgaaagcactaaggaagtgcccgtcggcaagatgacttaccgccagttccctcccaacgaggataaggtgtcgctgctgggctatggctgcatgcgctggcctacacttccggcaccgggtggcgacggcaacgtcatcgatcaggaagaagtgaaccggctggtggattacgctatcgaacatggtgtgaactatttcgacacggccccggtctatgtgcagggctggtcggaaaagtcgacgggtatcgccttgaagcgtcatccgcgcgacaagttcttcgtggccactaaaatgtcgaatttctccaattccgactatgatttcggagtaaagatgtaccacaactcgctgaagaacctgcaggtggactacatcgactattacctgctgcacatgctgggtgctcccggaaaaagcggcttgcagggccgtttccttgacaacggtctgctcgacttcctgctcaaggagcgcgaagccggacgtatccgccacttgggatggtcgttccacggcacaaaagaggaattcgaccgggcactggccatgcacgaccaggtgcactgggacttcgtgcagattcagttgaactattccgactggcagcacgcatcgggacgtaacgtgaatgccgactacctgtacgagcaggtgagcagcaagaacattccggtagtggtgatggagccgctgttgggcggacgcctgtcgaacatccccgaccacatcttcagccgcctgaaagaacgcaatcctgaaggcagtgtggcatcgtgggccttccgttttgccggtacaccggaaaaggtgctcaccgtactcagtggcatgacttacatggagcatctgcaagacaacctccgcacgtattctccgctggtgccgcttaccgacgaggaaaaccagttcctgctcgatacggccgacctgatgcagaaatatcccaccgtgccctgcaacgactgtaaatactgcatgccctgtccgtatggcatcgacatccccggcgtgctggtacattacaacaagtgcgtgaacgagggcaacatgccgaaagaccgcatggacgagaattacgtgaaggcccgccgtgcctttctggtgggttacgaccgcagcgtgccgagactccgtcaggccagtcactgtattggttgcggacagtgtaatccgcactgtccgcagtccatcgacattccgaaagagcttcaccgcattgatgcctacgtggaacaactgaaacaggaaacactgtgatggacgaactgatacgcttgctgaacgaaggaaactattcctgcgtggtgcgtcagggcgaagagacccgcacgttctcgcgtcggggcgtagctgatctgtacgacttgtatgccacagaccgcgccctcctgaaaggagcctggctggccgataaagtcatcggaaagggagcggcagccctgatggtattgggcggcgtgtcccgcgtatggacccgggtagttagcacccctgcactcgctttgctccagaagggaggggtagaggtggcgtatgccgaagaagtgccctgcatcatcaaccgcacccgtacaggacggtgtccgctggaaaccctttgcgacgtgtcggacaatcccgtggaactctatcccgtgattgaagactttgtacgccgtatgcgggaagccggagaaaaagaaaaaacaatctcagaaaaataacgaatacacatggaaacaaccgtaaaactttacacattgggatacagtcgcgtgaagacctatgtcaccgccctgctgtttgtggccggaaacattgtcctgccccagcttttccacctggtgccgcagggaggagtcacctggctgcccatttatttcttcacactggtaggagcctataaatacggctggaaggccggactgctgacggccgtactctcgccgttgctcaactcatggtggttcggcatgcctgcacctgccgtgctgcctgccatcctgctgaaatccgtgctgttggctgtgggcgccggtctggtggccgcccgctttcagaaagtcaccttgccgttgctgctggccgtggtgctgttctatcagctggctggtacgctgggtgagtgggcactttccggcagcttgttcaccgccttgcaggatttccgcatcggtattcccggaatgctcttgcaggtagtgggaggatactgggttatccgtaaaatttaagaaaatgtaattagttgattttcagaggtgtaaaaatcctctgaaaaacgcctttgtgtttggactaaaacgcccttacgtttaagatgaaacgcccttgcgttttacttaaaacgtacttgcgtttgggttgaaacgcaaaggcgttttgttttggatgtacttgggctttggaggtgtactgaatttggttgtacgttttcaataaaaaggatgattgttgcagggcttttgagaaagttttctaattttgcatattacgtaactatctgaatcaggatgacggatagaagcgtatacgcagtacagccttaattggaaatgtacagaaaaccggtagagaaagtgcttgtttatggtaaagcggaatttaagatagaatatgatagagcaggttttgattgagaattacaagtccattaaagacttgtcgctgcctttgaatcgactgaatgtgttaatcggttcaaacggagctggaaaaagtaatttcatttcattctttgaattgaccaaggcaatatatgagcaacgctttggcagttataccttgtctaaaggggggattgataacttgctgcgtcagggaagaaaagtatcgccgtctatccagggattgattgattttgacaatacaaatgcttttttctttgagattaaaccatcacaatcgaacaaaggctatattgaaaaaacgggagatttttttaataactgtcataagccgggaaaggattactcacagtggaatagaacgatttgggattctgccgtagaagaatcctctttgaaggataataaaagatggagggctgcttacttgagaaaatatttaggtagctttacagtctatcattttcacgataccagtgccacttctcccatgcgtggggattgtccgattaacgacaacgaatatttgcgtgataacggctccaaccttgccgcttacctgtattcattgatgctgaacgatgaaaagacattccgcttgatagagggtgtgatacgttccattgctccttatttcaagggcttcaagctccgtccggatgccaacaataaggaaagaattcgtctggaatgggaggagagggatacagatatgtacctcgatggttatagcttttcggacggtactttgcgtttcatagcccttacaaccttactgttgcagtccaagatgccggaagtgataattattgatgaacctgaattgggtttgcatccggccgctatcaataaactggcccaacttgtcaagcaggcttcgctcaaaagccagattattttgtctactcagtccaccaatctggtcaattgctttgaggtggaagacattattgtggtggacagggcagacaaccaatcggtttttcgtcatctggagcgggaagagctggaaaaatggatggacgattacgaattgtctctcagtgatttgtgggagaaaaacatgataggagggcagttatgaaacgtgtgtatattgtcgtcgaagggcagacggagcaagagtttgtcaactcggtcatttctccctatttgcaagaatttggtatattgagcgttacgcctgtcttggttcggacaagcaggacaggtcggggaggaatggtgagctactcacatttggcaaacacgatcaagcctcttttgatgtccccaaaaaacgattatatcgtaactacctttattgactttttcagacttccccacgacatgccccattatgaggactgcatgaagaagccggacaaaatagagcaaatacagtcgttggaagcggcaatcaatgaggctatagacgaccgtcgttttttctcttacatacagctgcacgaatttgaggctctgctgttttccagtaacaaaggttttgagtactatttttcggaagaactcgcagcaaagacagcttccatcatttcatcctacgacaatcccgaagatatcaatacctctcctgaaggggctccctccaaaagattgctggctataaagtctggctacaacaaagtgctggaaggaaacctgatagcattggaaatcgggataaaatccattttggagaaatgtccgcggtttgcggaatggataaagacaatcattgaaaaatctgaatagcaagttcatttttctgtttgtcactttttattcgtacatttgcgaagcataacccaaatacaataaccatgaaatttattggaattattcctgcaagatatgcatctacacgcttccccgccaaaccattggcactactgggaggcaaacccgtgatacaaagagtttatgaacaagtggctggtgtgctggacgaagcttacgtggctaccgacgacgaacgcatcgaagcggctgtaaaggccttcggtggaaaggtggtaatgacatctgtcgaccataagagcggtaccgaccgttgctacgaggcttactgcaaggtgggcagcggctatgacgtggtggtgaacattcagggtgacgaaccgttcatccagcgttcgcagctggaagccgtgaaggcttgctttgacgatgcgtcaacacagattgccacacttgtgaaaccgtttacgcctgccgacggatttgatgcgctggaaaatgtgaactcgcccaaggtggtggtgagcaaggagatgaaggcgctctacttcagccgttccatcattccttaccagcgtaaccgcgacaagaaggagtggctggccggacatacgtattacaaacatatcggactttatgcctaccgtgctccggtgttgaaggagattacatcccttccgcagtcgtcgctcgaactggccgaatcgctggagcagttgcgctggctggagaacggctattccatcaaggtgggcatcagcgaagtggagaccattggtattgacacaccgcaggatctggcacgggccgaagagtttctgcgcaatcagcaggaggcattatgacgcagctcgaccgtagtgtggcgcctgccatccgtcagctggagcatttctccatcttgcagccggagttgcatcgtatgaagaacggcatgccgctgtatgtgctttcggccgggaacgaggacgtgattcgtttcgacctgttggtgcggagcggacagctcgaccagtcgcagccgcttcaggccgtgtttaccaaccgtatgctgcgtgagggaacggtgcgcatgacgtcgggcgagattgccgaacggctggattattacggggcgtggctcgacctgtcttcttctgtgaactgtggatttgtgacactgtatacactgacgaaacaccttgaccgcaccatggagattgtggccggactggtgaaggagtctgtgtttccggaagagcagttccgcattatctgcgacatcaaccgccagcagttcctggtgaacaaccagcgggtggacgtactagctcgcaagcagctgaaccgttcgcttttcggtacttcgcatccgttgggacgctatgccgaactggaggattatgaacgcattcaggtggaggcgctgaaggatttctatcaccgccattatcactcgggcaactgctccatgtacgtgtcgggtaaggtgacgcccgaggtggtgcgctgcattgaacgtcactggggagaagcgccctggggaagttgtacggcagagaaggtggaacgcacgtgggacatcgtgaaggatgcccgtaaacgggttcacgtggagaaggaggatgccttgcagagttcgctccgtatgggtggtttctcgctcgaccgcaagcatcctgattacctgaaactgcgtgtgctggttacgctgttcggaggatatttcggcagtcgtctgatgtcgaacatccgtgaggataagggatatacttacggcatcggggctggactggtatcttatccgggcacgagtctgctggtggtgagtacggaagcggccaatgaatacatggagtctgtcatcacggaagtgtatcatgaaatggaccgtttgcgtcaggacaaggtgccggtagaagaactggagatggtgcgcaactatatgttgggtgatatgtgccgttcgtacgagggggcattctcgctctcggatgcctggatattcatcgaaacggccggattgaagcctgacttttttgatgcgtcgctggctgctatccgtgaggtgacgtccgatgaactgctttcgctggctcagcgctatttctgcaaagaaaacttaatagaggtagtggcaggtaaaaaagtataaaccttccggctcgtgcaaaagtaaaaagactatttttgagcggaattaaaaaagagactaagaacgtgagaaagaacaaacatacattatttttatttgccctgctggcattcagctcggtatcggcttcggcccagttgtcattgggatactaccagtttaaggatggttcggaatataccggcgaactgaaaggacgccgcccgaacggaaagggaaagacggtgttccgcaatggtgacgtgtacgaaggtgaatatgtgaagggtaaacgccagggtgaaggtacctacactttcagcgacggagaaaagtacgtgggagagtggtacgaagaccagcagcatggcaagggaacgtattatttcatgaacaacaaccgttacgacgggatgtggtacactgactaccaggagggtgagggtacgatgacctattataacggggacttatatactggaacctggcatcatgacaaacgcaacggacagggtacttatacctggaaaggcggagcggtctacaccggcgaatggaagaatgacctgaagaacgggaagggcaccatggtgtgggacgacaagtcgaagtatgaaggcgactggaaggacggcatgcgtcacggaaagggtactttctactatactaacggcgacaagtacgtgggcgactggaaggatgatgtgcaggatggaaagggtatctattatttccagaacggcgaacgctatgagggcgattatgccaacggcgaacgcacgggaaggggtatctatacgtatccgaacggtgacaaatacgtaggccatttcctgaacggacagcaggagggacaaggcacgttcacctgggccaacggagcggtgtacgacgggcagtggtcgaagaaccagcgctcgggtaccggaaaatacaagtgggccaacggtgatgaatacgaaggtcagtggaagaacaacatggccgagggagaaggtgtgcttcacatggccgacggttctgtctatacaggttcttttgtacgtggaaaggaagaaggaaagggtgtgctgattgaaaaggacggcactcgctttgagggcttcttcaagcagggaaagaaagacggtccattcgtagagatggatgccaacggaaatattgtccggaaagggactttcagatacggacgtttattggaggagaaaaaataatgatggaattatccgaactgactttgaaggtgcgtgaactggctgtagccacgggggcttttatccgtgaagagcggaagaagttcagccgtgagcggatcgagaagaagcacgcacacgattatgtgtcgtatgtcgacaaggaatcggaacgaagaatagtagcctgtctgcgggaattgcttcccgaggcaggttttattgcagaagaggggagcggaactcacaccgacgaggagtattgctggctggttgacccgctggacggtacgaccaacttcattcataaccatgcaccttattgtgtgagcattgccttgcgtaaccgtgaggaaattttgctgggagtggtttatgaagtgtgccgcgacgagtgtttctggacttacaagggggcgcctgcttattgtaatgaccgacagattcgggtgtcgcaggtagctgtacccgatgaggcttttatggctttcggtcttccgtacgaaacggaggcttacaagccggtattcaaccgcctgatagaaggctgctacgggcatgtggcaggcattcgggtggtcggtgcggcggctgccgagatgtgttacgtggccgacgggcgttttgaagcgcgtgccgaagcctttacttgtccgtgggatgtggcggcaggtatcctgctggtacagaatgccggaggacgggtgaccgacttttccgggggggattcatgctattccggccgcgaagtggtggcttccaacggaaaggtacacgattttttgttgaatctgctgggataatgtaaaaaaatatcgttttattcgacagataagaattaatttcgtaagtttgtgtgactcaaaagtaaagaatatggatataccgggcatattggatttcctgaaagtactggcggcaaacaacaaccgggagtggtttcaggaacataaagcggaatatttgagtgtgcaggcagacttcgaggagttgctggcaggggtgattgcccgcctttcgccatgggatgaaagtgtggcgcacgtccttccgcgtgactgcacgtatcgcatttaccgggatgtccgtttttcttccgacaagtctccttataagacccacatcggagggtatatcaatgcaaggggaaagaaatccaatcactgtggttattatcttcatctggaaccgggcaactgtatgctggccggaggaagctggtgcatgcctgccgatatgttgcgggcagtgcgtcagtcggtgtgcgaccgcattgacgagtatcgtgccattgtggaagatccggctttcaaggagtatttcccggtggtaggcgagtcgcatctgaagacggtgcccaagggatttccgaaggattttccttatccgcagtacatccgttgcaaggattttacggtggcctgccgggtggaagatgagtttttttcccgtccggactttatggaacggattatcgacgtgtttcgccagctgaaacgctttgccgattttacaaatgaaacgatagatgagtttgaataaaatattaacgatttaaaattgaaagaatatggttattgacaaattggaaaatctggaaaaatatgtgtcactgaatcctttgtttgcagaggctgtagcttttttgaaggcaactgacttgcaggcacacgaagtggggaaggtagtgctgaaggaaggtgaactgatggtgaattttgcagatgcacgtccgaagacaaaggaagaagcgcgtctggaaacacacaatgatttcatcgacatccagattccattgtcgggggtggaagtaatgggctatatgccgcgtacggatttgcccgaagctgcttacaatgcagaaaaagatattaccttctatgaaggactggctactgactacctgaccgtaaagtcgggtatgtttgctattttcttcccggaagatgcacatgcaccgggcgtaactcccgacggagtgagaaaagtgattgtaaaagtacgtgtcaaataatttctaattactaatactatggacaaggtattgaatatcataaagaatgatccgtggctggaaccatacgccgatgctatcaacggccgtcatcagcatgtggtagaaaaagaaaaggaactggtaggaaagaagacgttgtcggattttgctaccggacacatgtattttggtctgcaccgcacagacaagggatggaccttccgtgaatgggcgccgaatgcgacggaaatctacctggtgggcgatttcaacgactggcaggagaaaccggctttccgcatgaaacgtgtgcgcaagacgggtaactgggaaatcaatctgccggaaaaggccatgaagcacggcgacttgtacaagctgaaagtgtactgggaaggcggatgcggtgaacgtattccggcatgggctacccgcgttgtgcaggatgaacagaccaagattttcagtgcacaggtatggaatccggagaaaccgtataagttcaagaaaaagacctttacgcctaatgtggctccgctgatgatttacgaatgccatatcggtatgggacaggatgcggaaaaggttggtacgtacaatgaattccgtgagaatgtactgccgcgaattgcgaaggacggatacaactgtattcagattatggccattcaagaacatccttattacggaagtttcggctatcatgtgtccagcttctttgctccttcttcacgcttcggtacaccggaagaactgaaacagcttatcgatacggcacaccagatgaacattgccgtgattatggatattgtacactcacacgccgtgaagaacgaggtagaaggactgggcaactttgccggtgatccttgtcagtatttctatcagggcggacgtcgtgagcatccggcatgggattcgctctgctttgactatggcaagaacgaggtgattcacttcctgttgtccaactgtaaatactggctggaagagttccatttcgacggtttccgtttcgatggggtgacttctatgctttattacagccacggactgggtgaggccttctgcaactatggtgactacttcaacggtcatcaggatgacaatgccatttgctacctgacgctggccaaccggttgattcatgaagtgaatccgaaggccattaccattgctgaggaagtatcgggtatgccgggactggctgctccgttcgaagacggaggttacggtttcgactaccgtatggccatgaacattcctgattactggattaagattatcaaggaacgtcgcgatgaagactggaaaccgtccagcctgttctgggaggtgaccaaccgccgcaaggatgaaaagaccatctcttactgcgaaagccacgaccaggcactggtgggcgacaagaccatcatcttccgcctgattgatgccgacatgtactggcacttcaagatcggcgacgagaatggagtggtggaacgaggtgttgccctgcacaagatgatccgtctgcttacggcttctaccatcaacggaggttacctgaacttcatgggtaatgagttcggtcatccggaatggattgacttcccgcgcgaaggcaacggatggtcatacaagtatgcacgccgtcagtggaacctggttgataatccggacttgtgctatcattacctgggcgacttcgatgaggcgatggtcaagctgattcgcagcgtgaagaacatccagaaatcggatgtcatcgaggtatggcataacgacggtgaccagattctggcataccgccgcaaggatttggtatttgtgttcaacttcaacccgacccgttcgtttaccgattatggcttcctcgtaccgagaggtgcctacgatgtggttctgaacacagacaacaagcagtttggtggattcggcttctcagacgacagtctccgccacttcacctgtgccgacccgctttatgcaaaagacaagaaagaatggctgaaactgtatgtgccggcccgttctgcagttgtattaaaacgagtgaaagattgaattgatattgtatgagtgattacacaaatgcattttataagaagactgcacgcatcatgattgctgtatgcggtcttcttttttctctgtttagttttgtatatctttatgtgttccagcgcgatgtgctggaagcccttcatttctcgctggcacatggaaagacaacctttgctccgatagccagcgcgctggtcattacgctgattctgctgttgctgcgctggggggtaaacagtctgctggggctgaagggaagggtacgtgccctggcgtatgtgccgtcctttctggtgctttgtgccctgacggatgtagggcgtggagtgtatatctccgactaccatactccgtggacctggctgttgcctttattggtgttgctgtttgtgggaatcggttactggctgcgtggagtttttcgggtacagctgaatcacgaaggaagtctctggggactggtcaacagtaacctggctatcttgctggggttgtgcctgctgacagtgtgtgtgggtagtaccaaccggcagtttcatcatgagctggaggcggaacattacctgcgagccggggagtatgacaaggtgttacgcgtaggagaaaaatcattggaggccagccgtacgctgacagcttatcgtgccgtggccttgtcgcacttgggaaagatgggcgacaagctgtttgcttatccgcagtattaccgttccgacgggttgttctttgaaacggattctctgcacacgctccgttatacgaacgattccatttattacctgctgggagcacgtccttatgagggagaagaccgtatggtattcttgcggaacatctgctacaagggaaccggaaaatatacctcgctggactattacctttctgccttgctgcttgaaaagaaactggacagctttgcacaggccgttcccgatttctatttgccggaagataccttgccgcgttattaccgggaagctctgacgctgtatcatgttcagcggaatgatactgtatctttgcgtgcagacagtctgactttagatcgtttcaaggcttaccagaccttgcagcagaaagagggttctccgctggaagaacgcaaccgtatgcgtcgcgagtttggcgatacctactggtggtactatgattatcaggaataaaaaacatttgtgtagagataaaaaaattaagagaggctgccggggaaatgcagcctctcttattttttaaagaacaaacgcttttgcccttacagctgatattttcacaaataccaatactgttcttatctattactatgaaaaacatctttataacatccggttcacttggattgttcagagaaaaatgtaattttaacacttgttttgattctgtttctatcgtttacatatttccttgaagtcacaataagtgcaccggtcttcttcttccgtctgactgaaactcaggtcgggattgaaaatttcctccagaagtgcctgtaggcgggttctgaactcttcttccagcaatgaaaagtcttccacaggagtggttttgttatacgattccttgagctggacgacgggcgagtaatcttctgccgcagcccggtgaatgtagagcagggcaggagctactttccggtcatcattccgttcacgcagtttccggcatacgatggcggcatacaggaaagtctggaatacgtaattggaacgtttggggccgggcgtgaacaacgattctacgctgggcggggtgtcggccttgcctcccgtcttgtagtccacaatgcggagtacgttgtccttgctgtccatacggtcgatgattccccccatgcgcgagcggatggctcccttgggtgtctgtatctctacgtcctccatgacccgttgttcggagcctacgaaggtaaagggagcgtggcgcaggtcgttgcgaagcagctgctggatatagcgcagaattacggcggaattgatgagttgtaccccgttgtattccggacgctcgtcagtagggagatggaagaacagttccttgaatccgttgtccacgtaattctgtagtttcacttcttcctggagcagagcttccagggtgtctttgttgatgacttttccgtgtgccgtgagttctttgtagatgtgttcggcagcgtagtggaagatgcttccgaatttagccgagtcgatttcggcgcttacttcttcgggagctgccagtcctgctacgtacttatagtagaacttcagcggacagtccaggtagcagttcagggctgacggggaaagaagggctttcggattcacccgcacgtcgaacacgctctgcatccgtttcatgatgtcgggcgacttggggatacagatgggtgaggaagcaatgggcgactgctctgcctccagttgtttccgctgtacgggatagccccactcaatcagcagctggagcatgaagcgcgacatctctccccggttcatgccgtcgctcaccgtgttgtagagtaacgtagccttctctgcccgttgcagcagacggtagaaatagtaggcatagactgcaatcttgtggtcgatggtcgtcatgccgaacgccttgcgcaggctataggggatgaacgaagcatcaccacccgccttgggtaactggccttcgttgaccgacagcagaataacatgacggaaatccaggttacgtgtttccagtacccccatcacctgcataccgatggccggctctccgtggaaaggaatgctggctgtcgacatgacgcgtaccagaaggcggtggaaggtggcaggttgtacctccaggtccttgctttcaagcagggcatggaagcggttgaccatggtgaagcttttgaacaaggcttcgcgatagagctggtcgagggcatcgctggtggaggctgcctgcttgcgatacagctgtgccacctgcttcaagatgtcggccagccgtttgcacagctccaggttgtggctgcacggtttgaacagcagcgacaaggcttcgtcccgttccagttccgagggcaggggatagaagcggttcttttccgtcagttccttttccagcggagcggcttcttcggaaagcagttgcgtgtacggatgcttcagcacgctgatgacttcggcaaattggtagcgtccgctgcgggaattgtagcccgcaatgtgcagttccagcaacgtctttacgaagctgtaggccggtgtctgcgagagcgggaaacccatggtgatgttaatgtggcgcacgttatccggcagtgagtgaagcacaggttgcagcatggcctcgttgcagagcaccacggccgtttccttttcgttctccgtcaggttttcccgaatccattgcggcaggtagcgtgcttgtccgtttcccgtaggcgattcgatgaaggttatttctttcggatggttcaggtggtcgaacagggaaggcggcaattccgaggggaaattcttcaggttgcggcggataaactcgcctgcctcgtgcggatgcttgttcaggtagaaggtatcgtagtcccagtagaacagggcctttcctgcctcgtgcaatttgctgaacagggtttgttccaccttattcagcacgttgaatcccacgaacacatatttgtcgtagggaaactgctgcacgtccatggtctccgtcacctcgcggtagagcattccttcataggcgatgccctgctcgcggagcaattccttgtattgcgtatagatgtcgcccagcacgtcccacaatgagatgaaacgtcgcttcagttccgtcacctgctcgatggagaaattacggaagaactggctcaacgcttccttctgtccttcctccaggaagtcatattcgcccgtcagtttgttcaggtccttcaggttgctgaacagcgacttggtgtcggccatgttcttgtcagcatcgtcaaagtcgctgatgagcatctcgccccagaagtagaattcgtccaggctctccttgctgcccgttatttcacggaacaccttgtagaggtcgcacactaatttgatggaatcgcccgtcacccattgcgacgactggcggaacagttcactgatgctcacgtaggccggcgaccataccgggcggtcggattcctgtgccaagtattcattgaaaaagaggctggcacgcttgttcgggaaaaccacagccaccttcgtgaagtctccgttcatcttccggtacaaatcggcggccacctgcttcaaaaaagtttccatatattgcattgtcgaaatatcgttgtgaaaaaataaactcaggccggaagcgtcacttcttccagctcattggcaaacacataccagaggaatccccggatgtgggtgtagcccatctgcgtgagcaaatccatgtactcctgcacctgtgcgcggtaagcctcgttcttctttccgaacttgaagtccaccacgaccacctgtccgtctttccgcatcacgcggtcggggcggcgtgtctgcatctgtccctgctcgtcggtgtagacaatggcacactcgttgtaaagctcccacgtgccgctgaaccagtccttcacggaaggatgctgcaaggcccagtgcgccagtccctgaatttgctgcttctgctcatccgattcgaacaccccttcgaagctcagccgttccagtgccgaaggaaggtcgtccgccttttcgatgtgggcaaacacctggtgcagcaactgtccctgacgaatgtactgtccgcgagtgtcctccgtgtcatcaccctgaatgaagtcggccgaacggtttgactgcttgaattcgatgtgcgtttcgatgctttccatcttcacgggcactccctcgcggggcgacgaaagccggttggatttgcccgccttcttctcatcgtgcgccgtgcagagttccccgtattcgcccactgcatcgtcttccggattctcctgtgccagcggcagttccacttcctgcatgagcggcagactgttgtacaacagttctgaaaccgttcccttctgtcccgctttggcgaaaataatcaggttcttgcaggcgcgtgtaaacgccacgtaaagcagattcaggttgtccacccagagctgtaatttctcttccaggtaatcgtcgtgatacaccgattccgccatggcaccggaatagttcaccggtacgatgtccaggcggttgaacggcggaatgtcggtttcctttcccgtgcctgccacgctgcaccatatcagatggttgttcgtttcgttctccatcttccagtcgcagaacggcagcagcaccgtgtgatactccagtcccttcgacttatggatagacaagatgcggatgccgtcaatctcgcccgacgggatggtcttcgcgttcagtttctcatcccagaaacggatgaaagctgttagctccgacgagttgttctgcaggtattccgtcactgcatcatagaaggcacagagatatgcatcctgcttctcgataagctgcatgtcgaacagcacgaacaacttctctaacagttcgtacagtggcatgaaacggagttcgttagcctgcaactggaaggctgccggcaggtaacgagccgggtcgtcgagcagcaccgtgttgaggctgatgtccttgcgcaatactccttgctgataagctaccgccagtcgcgccagtgcgatgcggtcgtcgggtgaagaaagataccgcagtccgtcgatgagcatgctcactgccagcgatgcactcagccggaacgcctcgtcggatacgatgcggtagggggtatgttcgtcgaagtaagcggcaatgtcggggatactccggttctttcgcaccagaatggccatctcgttgaggcggataccctctgcggtgaggcgttccacttcctcggcaagctgttccaaggttgcttccgtgtaaggcctctccttggaatcctgcaggaaggtcacctttacgaagcccttctcctccttcttggcacaacgctgccgcacgtcgctgtacgcctgttccagttgggcacaaggcatgccctgttcctcctgatagcgccggttcagtgtctggcaggccgccgtgaaaaactcgttgttgaagcggatgatgcgtgcctcacttcgccagttcgtgtcgagcgtacattccttgatgcggaaactccggtcattgcccagtcccgccagaattttccagtcgccgcttcgccagcggtagatgctctgcttgatgtcgcccacgatgaggctgccttccttctgtgccagactttcctgcaacagcagatgaaagttctcccactgcatgcgtgaggtatcctgaaactcgtcaatcatcaccgtatcgatggtggtaccgattttctcgtagacaaacgaggcatctccctccctgattaagctatggagcaaggcattggtatccgacagcagaaaacggttgtgcgcctggttctgcaagcgtacctcctcgtcaatgtgcgccagcaaacgcaggttattcaggtaacgcagcgaaaggtcgcacgagttgagcagcaagttgttctgcggacgacggttttccgcttccgctaacaagggtatcagttccgaagccgccagcgaacggatttcatcgcggtggaccgacgttttggtcgtccagttttcctcgctttccaggcacttctccacggtggcattgcggatgtcatcgctcagtttcccgttggccagtttgttgaaataactgccgatgccccgtgagccgttcttcaggtctgccggagtcagtccgtgcatttcgagcaagcccgtaaactgttcgctgaatcccttcatgaattccagcacctcttcgcggatacttttcagctcatcccggtaggaaggaataaagttcgggtcggccagtttccggcgcagtccttctcccttctcgatgtagctctcgtcgaaaatgttctgtccgaatcccttgatgtctttcgacacatcccagcggcggtcgttcacgatacgttcctcgatgtactccagcagccagtagagcaccggtgagcgccggtccagcttctcaatcatggcatccaccgcatcgctcagcacctccgtattgttcagttcgatagacaagttggcccctaactccagttcacgcgccaggttgcgcatcaccgactggaaaaacgagtcgatggtctcgatgcggaaacggctgtagtcatgaatgatgtgccgtaatgcttcgcgtgccgattcccggatttcctcaaccgatttggttgatgtcttctgaatctccttcaggtagccctccgaaccttcgtcggccgtagcgatgccgtatagctgttccaggatacgctccttcatttccgccgtcgccttgttggtgaatgtcaccgccagaatcctgcggtaggcatacgggtcttcaatcagttgtcttatataatgtaccgccagtgtaaaggtcttgccggagccggcagaagccttgtagactaaaagctggggatgctgttccatgtgtgatgtcgtttttagggttttcgttacacaaacttacggaattttcgcggaaaaaccgcaggaaaccgccgattagtgaggggagaaccgtggcacgtgtatccggaaatcttcctgcggtatgctgaaaatgcctggaagctttctatgttttccggtgcggaactgtatgtttcccgtccggaaaacgtagggtttcgccctggaaaacctatggtttgcgtgtggaaaacataaaaagttgtagtatgtttcttgttttatgtgacggcctttggaaaagatagatagagaatatctactttagtaaaatgtgtttgaaaatgttggtatatattaacaaacgtgattatctttgtaccagataaccaggtgggagagcctggttgtccagcagaatttagaaataagataccaaaaaactttttattatgaaattaaggctatacatcggagggctgatagctttctccgttttattttcttcgtgtgggaaagactcggaagagggagaatcgtttgaacctcacacatataatgtttcggggaaggtagaaaaaggaccttttgtgagtgggtcaaccattaccattcagcccatggattccaagcttcaggtaagaggtgatttctattcctctaccattcaagacgatatgggaaatttctcttttggttccaaattgtttgaagctccttatgcagaacttacagctaacggatatttctttaatgaagtagaaggagagctttcttcaggtaccttaagcctgcgtgcattggttgatttgtcagataagaccacggtcaatgtcaatgtgctgactcatctgaaataccagcgtgtacagaagctggtggaaggaggtatgagtttcaaagaagccaatacgcaagcacaaaaagaattgtttacggctttcggactccagaaatatgaagataaggatgcctcttcactttccatcattggaggtacagatgaatcagctgccttgattgctatatcatctttattgattgtagatagaagtgaagctgctttgacggagtatttggccaagctgtgtaaagaatttggagataacggtgcatttacagagtcaactcggcagcagatggaagaagaccggaatgcattggccgggcagttgtcggctgttcgcaaccatgttattgaccgctatgaggaaataggcctgccgatagaagtgaaggaactggcttacttctttgactgggacaatgacggagtggccggaaatgaaaccttacaagaagggcagacggttacactggaaaccacggagcttcaggtaccgaaccagggtggcaattatacgataaagattacctctcctgtaccagtttatttggaaccactaatttcagaggatgatgaatcgtatccacctctcatttcggatgattatttttctacgaatatttatgagggtttggcggatgcatctgtttcccttgagaagtcgctggagaataatgtgcttaccattaatgtgagtcctctaaattctcgaacttctaaagaagcttctgtgaaagtatacgactgtatggggaatgaggtcggagaggtgaagattgtccaggaaggaaaccctgatatgcctctgcctaagttgggagagactggcaagacggtggtggctggatttgctttagaacttgcaaaagctttttcgcagtggtcgttgatggaacaatattaccattataacaaagaggcaaatttagtttctcaatatataagtccggatgcgacgattataagtgacatctggaactctttttatcgtgccaataggatgaacctgatgtttaaggaagcagaagcgaagcaattgggagtatatcagagttactttgatgtatggaatgctttgtattattattatatggttgtggcatggggggatgtaccttatgtagacagtactgattttggggtagcaggtggctccagtattttcaagacctcccagtctgagatattttcccgtttgattaaggagctgcaagaggcaatggataatctggaggaaaagaagaatgaatcattaagagacgttaatgactttttctttgtttccagagatgtggctcgtatacttctggcagatatttatatgtatcagggtaattatctgcaggctgaatcacttcttgccaaagttatatccggtggcttttatatgttggactcttccaattataaccagaaagaaacgattacggatttatataacaatgggagtggaacagaaaccatactggcagttcggaatggcgtgatgacacgtagcaacatctcgttaggagttccttctcttgttcctcttatgacatatacagatgtattactgtcatatgcagaatgtctttgtaaaaacggtagaacgtcggatgcagaaatccagttgaataagcttgttacagcaaaggaacttcaattgtcaggtgttacggttttggacaaaattaagagtgctcggttgcaattgacgctttactgtgacgtgaactttgcatttttgaaaaggacaggacttgcaaaagaggtgtacggagtagaaaactatagattgttactccctattccacaaagagatgtgattgcaggtggaatttcacaaaatactgggtattaaaatttcgcaggaatttagatgtattggatgcttggtttgacttgaataaatacactcaagatttgataaaactctgggaaaaatttgtgtaattcaaaataaaagcatacttttgcaccgcaattaaggatggttccgtagctcagctggatagagcaacgcccttctaaggcgtgggtcctgcgttcgaatcgcagcggaatcac

SEQ ID NO: 3769 - DNA, 7648 bp, Unknown
  gut microbiota DNA sequence
aaataagagaaaatcaagcggtgaaaatatcgttggttttctctttttcttttataaatgtttgtaagtttattaaaattgcatatatttgcaccccgataaaactaccgaccttgtttttacggacacaaactgaacgagcttaagctaaactacagaaaaaaatcacttcgtaaggccgattacaaacgagcctgtattatatcatttgaaaggatagagaaagcgttcttctaaaatcgaagaataaaactgacaagaaggacagatacagcccgcagactgttttcgcagttgagggaggtacctgtgcaggattgtcatacccatttttttaaccaaaaccaaactagacttttttacaaccggtacctgagggggagaaatgtcctcctcaggctaccactaaactgcgataactaaacttaattgtacaacaaaatctttaatcatctatgaaaatagaaagagctactcagctgctgttccttttgctgataagtcagggaggaaatgcagcctatgccaaccttccgcgaggagccagtgcttcttccgtacaagtgtcggcgcaagcaaacaaaatcacagtgagtggaacagtcgttgacgtgaatggagaacctctggtaggagtgagcgtgctggaaaaaggtaccggaaacggtacgattaccgacgtggacgggaactttaccttgtccgcaggcgaaggggccgcactcgaaatctcttacgtggggtatcagaacctgacggtttctgccaaggaaacactgggtgttctggtcatgaaggaagataccgaacaactggatgaagtagtggtaacggcattgggtatcaagcgctcacagaaggctttgagctacaacgtgcaggaggtgaagaatgatgtgctgacaaaggtaaaggatgccaacttcgtgaacagcctgaacggaaaagtagccggtgtgagcattcagcgcagtgcttcgggtgtgggtggaggtacccgcgtcgtgatgcgtggaaacaagtctatcaagggagacaacaacgtgctgtatgtgattgacggtgtgcccatgggtaatcaggccgaccgcacaggcgacggtacgggcttcggtgcaggacgcacgtcaagtgaaggtattgccagcttcaaccctgaagatattgaaagtctgtcggtgctgacaggaccttcggctgctgcactctacggagccaatgcggccaacggtgtcatcctgattaccacgaagaaaggtgctgccggaaaggtgagtgtcaacgtgtcgtcatcggctgaattctcgaatcctttcgtgctgccacgctttcagaacacctacggaaacgtgagtggggaggctgcctcgtggggagaaaaactgccggtaccttcttcatataatccggccgacttcttcaataccggaaccacttttaccaactcttttaatctgtctgtgggaaatgacaagaaccagacgtatgtgtccggttcggcggtcaatgccaagggtatcgtgcccaacaacaaataccaccgctacaatgccatggtgcgaaataccaccaagttcttcaacgataagctgaccatggacttgtctgccagctacgtgcgtgagtattacaacaacatgctgtcctacggtacgtatttcaaccctcttctgggagcttatctgtatccgcgcggagagaattttgagaaggaaacgtatttcgaacgctatgatgccgagctgggctacaatgtgcagtcgtggacaccgggcgacttcggtatggctgtgcagaacccttactgggtggcttaccgcaatttgcgtcctgaggtgaaagaccgctacatgctgtatgcatcgttgaaatatgaaattaccgattacctgaacgtgagtgcacgaggccgtctggataatacctatacggaaagagaagacaaacgctatgcttctacacacggtacgtttgccaaatcgctgggacgttacatctattcgaatgaaaccttccgtcagaaatatgcggacatcatggccaacctttcgaagccttttgccggagatttttatgccaatgtcaacgtgggtgcttctttcgaggaatacgatacaaaaggaagaggatatggcggacagctgcttaaggtgccgaatctgtttgcttatgataacatagacccttctaccggtgtaccttcacagacgggaggtgacaaccgtaagatgaatctcggtgtgttcggctctgcggaaatctcatggaagtcggccgtgtatctcacactgaccggtcgtgccgacaagccttctcagctggtcaacagcaagtcgccctggatattctatccttctgtcggactttcggctattgtgacggacttgttgcccgaaaccatgcgccagtccatttcaccggtgctgggcttcctgaaagtgcgtgcttcctatacggaggtgggttcgcctattccttacaccggactgactcccggaaccataacgcacaccattgaaggtggtgtaatcaaacctttcaagtattatccgctgccggagctgaagccggaaagaacccgctcttatgaagtaggtatcgactccaagtggctgaacaataccgtgtcgctgggtgtgacgttgtataaatcgaatacctacgaccagttgctcgaagccaagctgtcggaaacgtcgggttatgactatatgttcgtgcaggccggtaacgtggaaaaccggggtatcgaactggcgctgggatacgaccagacctttggcaatttctcatacagtacctcgctgacagctactgccaaccgcaataaaatcatcgaactggcttcgaacgtgaagaaccccgtgaccggagaggcactcgacctgagcgacatcaaggtgggacgtttccgcctgcgcgaaggagaagaagtgggtacgatatatgcggaagaacgcctgaaacgtgatcaggacggctacatcgtgtacaatgaaggccagaccataactacggaatctacggaaccctacaagctgggtagtgtcaatgccaagtggaacctgggctggagaaacggctttacctacaaaggctttaacctgaacttccttgtgactgcccgtctgggaggtatcgtgatttccaagacacaggccgtgctcgaccagttcggtgtgtcgcaggcctcggctgatgcgcgtgatgccggaaaagtcatggtgggtaatgtggcagttcagccaaaagactattatgaatcggtggtgaacctggatgcgtataatgtgtactctgctaccaacgtccgcctgcaggaagccagtctgggatacaccttccccaattcctggttcaagggtactccgttccatagtgtgaacctgtccgtgtatggcaccaacctctggatgatttacaacaaagctccttttgatccggaactgacggcttctaccggcaccttcggacaaggatatgattactttatgttgcccagccagcgcacgtatggagtgagccttaaatttggattctaacaaatcatgaaaaacaacgtataatatgaagataagaaactatttgatacctgtattttccgtattggcacttgcatcttgcaactatgagcagatcaatacaaatatctatggtgtgacggaagaaggaatgaagacgggcggactgctgtatggggctcctttcatggacatgcagaagctggttattcccatcggttcgcccactgaatcgacaggaccgggtaacgacctggccaatacagacatcatgtcggccggtaactacatcggttactggggcatgaacaacaactggaatttcaacacggaggctacgtggaactttacggatgcccgtatgagctatgcctaccagaatttctattcgaaactgttccgtgcatggaatgacatctacaagcatacgaagaattcggaagaccctgccgacaaggaagtgcaggctgtagccaacattgtcaaggtgactgcctggctccgtgcgacggatgtgttcggcccgattgtatataccaatgccggcaacggagacattgccccgaaactggattctcaggagaccgtgtacaaggcgatgctggccgatttgaaggatgcttcgctgctgctggtcaataccgcatcgaaagtgcttccgtcgtacgatgtaatttataacggaaacgcttccaactgggtacgactggctaactcgctcatgttgcgcatagccgtccgcgtgcatttcaaggacgaggcactggcaaaggaatacatcacgttcgcccttgacccttctcacggaggtgtcattgaaaccgtggcacaggaggccaaaatacggagtacggacaagttgccgctgatgaactccatgctgccgactgtagaggactacggagaatgtcgcctgggagctaccatctgggcctacatgcaggggtatgacgatccgcgtctgggtgccttgttcacgtccgattcttacggctatttcatgcctcttcctcctacgaacaacaatgcccttagctccgcagccaagacgggagcctccaagcccaaggtcgatgcggcttctcctttgttctggttgcgtgcttcggaagtgtctttcctgaaggcagaagccgcactttacaaactggcaggaggtaatccgaaagcactgtatgaagaaggtgttaccaagtcgttcgaagaaaacggagtaagcggagtggctgcctatctggaggttacagactttccttatgacatcagccggtctatgttgccttacaaccgtcagtattcctgcaagctttctaccggaaatgtgtctcccaagtggaacgatgcggattcggacgaagtgaagttgcagaaaatcattacccagaaatacctggcactctatcccaatgccgtggaagcctggactgaatatcgccggacgggctatccttacctgctcaaaccggcttatgacaaagcttacgtgagcataggaggtgaagaagatgccattacgcccgaaagattccgctttgctccggcagaatatggtacaaatcccaacatgtcggaagtgcctgcgctgctgggtggggaagaccagggagcaaccaagctgtggtgggtgcgcaacaaccgtcccaaacagccgaaatgagaaatgagttttatggaaaagtgtaacaaatgaagcgatgaaaaaaatcataagatatgcaggagccctgctgctggcggcaggcttcgtggcctgttccgaatggaacatgcctgaaagagaaacgttcgaaaaccaggagaacctggaaaaatacattcccttgctggaggcggaaagtgaagccgacctgactccctccatgcgtgactattttgccaaactgagagaataccgtcaggcgcctcatgtgaagggattcggctggttcggcaactggaccggacgaggcagcaatgcgcagaactacctgaagatgctgcccgacagcgtggacttcgtatccttgtggggtacgcgtggaaacctttcggaagaacagaaaaaagacttgaagttctttcaggaaatcaagggcggaaaagcgctgttgtgctggattgtacaggacctgggcgaccagatgactcctccgggacaggaaccgaagaaatactggattgaagaaaaaggagggggcaattttgtggaaggcgtgaaggcctatgcaaatgccatctgcgataccattgagaagtacaacctggacggtttcgacattgactatgagcccggctatggtcattcaggttcgatggccaacggtgagatgatcagcgaaacttcgggcaatacggacatgttcgtatttatcaaaaccctttcagaccgtttgcgtccggccggcagaatgctggtaatggacggtcagcctgagaaactttctaccgaggcttccaagtacatcgaccactatatttatcaggcatactgggaacgttccaccgcacaggtccttaggaaaatcaatcagcctcaccttgaaaactgggagcggaagaccattatcaccgtagagtttgagcaaggctggcagacaggtggagtagatgagtacaccagcgtacgtccggaaatcaatgcttatccggaaggacgtcagatttttgattatgccacgctggaccttcccgacggcagacgcatcggtggcatcggtacgtatcacatggaatacgactatggaaatacacctccttacaaatggctcagagaagccttgcgcttgggaaatgtggtttatccgggtaagttagattaaaatttgaattatgaaaaagaatttatatttcagcatattcgcaggaaccttgctgatttgttcctgccagaatgaattatacaaggatgcaaccagtgagtaccggtcggcacagggggcttacatcaagactggcgaatcttctcaggtattcgtggaagaaggaaaggaagtcgacgtgaagtctatcaccgtatcactggtacagcaggaaaatgatactaagacggtgacggtagaggccggcaacaaggagcagctggaagcatacaacaagaagcacggaacggattacctgatgcttccgcccgaaatgtatgaggtgggcaaggaagtggtgttcaactccaagcagacactgcaatatctgccggtaaagttcaaggatgtgaaattctccttgcagggaagctacgccttgccggtaaaactggggggcggtacggtacccgtgattgacagtgaatctgaatcactgattgtactggagcagcgcatcaagacgaagtgtcttcgcattgacggatacggcagtgaagatgccaagatgttcccggacgatttcaaggtggaccagtggacgatggaggttatggtgaaccgtagtgcataccagagcaacaaccgttccatctgtggtaccaaactcgtgtctgggtccggtgcactcgatgaaatctatcctcgcttcggtgacgtgactatccgtcccgaccaacttcagtttaagactggtggttctcagattgacgtgccggcggatgtctttacagcgcagcccgacacctggtacatgatagctttcgtgtacgacggtaagaaaaattacgtatatgtgaatggcgaactggtggccgaccgtgaaatccgtacagggccttacggtctggtgggtttctggattggcggtacgaatgagctggttcgtgaaatccgtttctggaagacagcccgcacaccccagcagttgaagcagttcatgtggaaaacggtagacggaagtgacgaaaatctgctgctgtattatccgttgaacggaaagaagcgcaaccttgaaacaggagaaatcaccgaggacgaaaccatgctttgggatttcagtaacaatgccaaacatctccctcttccttcaggggctaagtttgacgacaatgatggaaaaggctttatgttccctttggttgattaattataggttttattaatgaagaaaggctgtctccaacactctggtgtggaggcagctttttatgtgttattatagggacaaatgatatttaaatatagaaaaacttttagtatctttaaacaacgggaaacaactatcac

SEQ ID NO: 3770 - DNA, 146020 bp, Unknown
  gut microbiota DNA sequence
gtcatagtccgttatgtcctttccgggaaccagcacctgccttcttacgaaaaggtaggtgtcatggaaattgtcctcgtccagcattccgtaccggcgtaacgtccctctcagcctgtcataggattttgtgaaccactcgttgaacagtctttccttttctgcgctcttgtctgccatagccttatatttttttgagtcgttatacatggcctacacgggtaggcattcttatttcttgtgcttcctccagtttgtttttcggcggtctccggcaaggcttgccgtgaaaaaatacgctcacgcaaagcgtgaggaagatttttttcacgagcaaccagcccgaagggccgccttgcgggaccggcctgaaaaacaactatttttgccgcaagaaatgaggatgacggattacttccttctatctattgtctgtccggtgagaatttaaaattccatgcagcttttctgtcttcggcatgtttggagaaatattcaaggatgtggaatgagaacggcaatacgtgatattgcggaaggtgcggaaatgggattggaaacaggaagcgtgcccgggctttcatgcagtttatacggcggtgttgattttggggaggattacagggaagtgacaggcaggttggccgttccggagaaattgtatgtgtacgttgttccttccgaaatacggagtcttttaaaatcatggaagacctcattcgggagtgtatctcgatatttacctgagacaaaattataagtcgcctattcatggataagtatttggaatatatcaacgacatgctacgatgcgataaagagcatcggaatgacagactggaactcgcaaccggctgataatgcgaactattctaaaataagtgtggaaaacttgaagacatccgccggaaaaccttggaaaaagaagaaccggacaaagtctccgccttcaaaataatgctctattatgccacaggtgcggcattacttgtcattccggattggctgcccgtgaaatgtaacgataaatccaccgcccgccatcaagaaaacggccggtgccatatggcaggcaatcgtagcggcagcccgtcttgggaacccgttgtcaccccaaaggattttactgatatattactgaagtttccccccccctcatatcagctatttgagtaatagtttccttcggtgggcggtctaaaaatcattgttttccgaacgatttaacgcacgactaaaaaatgtttagtccaaatcgggcatggcataatcgtccgaatcgcacagaagatgtgcccagacctttgtggagaagtctgccatttgccgtgcggctacagttgataggcatgccaacagatccactcctgcttcacgcgataaaacttccaacagatgcctgacttcttccaaagtcctgctccacagggtgagcacttgcagccgatcacgctcggaacggaatagtgctcccagggtttcatattctgaaaagcgtttggccagggagagcatctgatacatcatgaaacacaaggtggtgtctgcaatctgagcgttgtagttccgactctgacatttccccagtccaagataaccacggcattccttaaatatgacctctatgccccagcgtctttcgtaaagttcaaaggctctgacgaagttcatggaagtatctgtagtaagcagcactttccaatgggtgcttcgcccgtatttgatgatgaagatgcgtacggactgttcgcccagttttgcatgaagctgaatgtatttgcacttgtactttcgccaatagcatgaagctgtgcgttcataccttacaatcagttcatggatgttttggggacgtttggtcttgcttgtctgataacgcaacttggggttcatcttggtcaaaccaatatagtgcactgaaccaccgcatagctcgcggactgcctgtatgagcgattcgcatgtaaaccaactgtcagcaagcacatatttgaagttgataccatgccccacggcatgacagagcatgcgtctggccatttcaagcttgctctcatcacattccgccttgcgcgcatagtccggattttttgcgttccgcttttctttgaactgctccttccgctgttttaaggtcaagccgtaatccttcttctttcctttttcacgatgaagggagaagtctatgggatagcagcttttcccatctgagagagccagcgtcaggcatttcattccataaatgaagctgtgggtgacatggtcgaacaccttgctgacaccttcgattcgaatgccgcttttctgaaaggttgtatcatcaaggatggcacaagtgtcattctcgtcggtattcacctgatgctcccggagaatggcatggaagcgaagggtgattttggtaagaagcattcgccagtcaatgcgggcgttcaaaagtgcgcgatacagcgtgttctttgacacagcgcaaagtccatgaaaatgattggaagtggcacttgcaatcgtctttccccacaggcgcatgatgaggagcgagatgaagagggaggtcaaggtatagccctgagtcttctcaaactttagattccgaacgattttaccgatgcccaatgccttcatgacgactaaaagttgctcctgggcttgttctttaacggataaaaccttggtaagttcgttcaaattacctatttttgcatctataacagtattcttatttcccattgtaaatcagttgattaagcacctctaatttacgaagaaaatttgaattactgttacttcccaccctctttattgggggtgggaaactttagtatattattatgtcagtcctttttcaaatcaaaatacagcaagcgggttttcaaaggttcatcttgcggaatatcataatattgcttttctatcacgtctgttttatagagtgggacgaaaccgtttctttcataatatctgagaatcttttcctcattgtatgcatccaccacgataaaacggcatcctgtcttgttgtcctcatgacggaaccagtcttttatgaaagccatcagttgccgtcctacgtggcttgatgtaccctgatattcccggttgacacccagtcttcctatcagcacggccggatagctgcgtccacgtttaggatttacaatattgcgttgcagcctgtttttatcattgggggatattagtctggtcttgatactgtcattggacaaggtaaacaaggccacaatacgatgcgggatttcagccgttacccaacaatatgtttttccaaggagctcatccgcatacagatcggcatcattgagaaaaaaatcatcaaggtcattctcgccacaagtgaaaggaaggcaattcctccgtacttccttgttataggcaagcatgacacaatcatcatataaagaaataccgtccattgctgttaattgaaccggaatgaacgggatttctccaatacttttcgcaaccgtttctttgcctccactgataaccggggtgttacctttgcggcgttcttgtctgcactgcgtacgaaatcttccgccgtagcgccctccaaaaccggaatgttcttgatagttatagccatgatattattttttgcaaaaatacaattttgttgttatacagccaaataatagcccgtcttccactcttttttccggaatgttcctccatatccggaaaagtctgtgccacgccgcctgttgcggtaagccgtttctcctaaggaaagggcaggcaataccggcggacgtggatatgggcaaaacaacccgcatatgcaatgcagagggagcaggagagccttcaccacagccggagaggaaagcggtctcatgccggggtacggcatgaaaaggggccctagacagttcttttccttgtcgcacatgcactacgtcggtcgcagttttcgccttctgaatccctcttacgtccgtccctgcgctttcggagcgtttttccggtagaaaatttcaccatgcggaaattttctaccggaaaccggagggaaaacgcggagtcccgcagggacggacgaactttgatgaggaaggggaaaaatcgttcctttcgtaaataccatttcctcagatggcatcgcatatttccttctccatcttttccagcttatgggacaggatttccatgtcgctgctgatcttctggttggttatccgggcatatatctgggtggttttcaaatccgtatgccccaaaagacggcttacggtctcgatgggcacaccgtgcgagagcagcacggtggtggcgttcgtatgccgggcaacatgataggtcagccttatcttgaaaccgcactgcctgccaagttccttcaatatggtgttgcatctgccgttgctcggtaccggaaatacatgatcgtccttggatagccccttgtacttctctatgatgcgcttgggaacgtccagcaggcggatgttggactcggtgtttgtcttgcgacggcgggtgatgatccagaggttgccgtcgaagaaggtctggaaccggtcggtcgtcagcgccttcacgtccgcgtatgccagtccggtgaacacggagaagatgaagaggtcgcgtaccagttcgcaggtcccgcttttcaccggggcctccatcagcgtctgtatctcacgctccgtcaggtagccccggtcaacgctctcgggggagttgatgtacccggcgaaggggttgaagggaagcgcgccgctgttgcgggcgatggagatgacgtgcttgagcccgatcatgtaaccccatacggtattggtgcggcatttcttctccgtacgcaggaaatactcgaagttgttgatgaacgtcaggttgagttccttcagggggatgtcgtcacggcggtacactttcgggacgaactcgcacagatgcctgtatatggtacggtagcggttgtatgttccctgcacgcggctgtgtcccactttcttgatgaactcctcattgtgctgctcgaagagcttcagcagcgtctcgcgtttcacgcccagtccgaggcaggcgtccctcagcctggcggcggtgacatagccgtcggactgcatcagttcctggtaacggcggttcacgtccacacgtatccggtcaaccgccgcattgattttctgcgcctcggcgctcttgcccgtggcacgtgccgttttcacgtcccaaagtttcgggggcacgtccagcttgcagctgaactgcttgatttcgccgtccaccgtaagacggcacatcagggggagatagccgttggctctctcgctgcccttcttcacgtagaagaggattttgaaggtcgatctgctcatactcgttttcatacttttttgatcgttacaaagttaatatcaagcgagttgtcctcaggtatgaaaaactgtgcaaattactgaaatagaatctgttgtgccgtttcttgttcctgttatatcagtaacgatatgggaactgaagtctttcgcagcttttagcggacctcctttttcagcttatgcagtattatgagttaaacacctaaccacttaatagactgcatttttgctgtattatcatcaaccttgctttttcttgctgcgtttactttaagtttccaaggtaataacggtttataggttataaaaatgcacgattctcctccttttttgcatgattaatagttgtatgtgatacactaattccctatctttgcatcaaacgttaacatataaagtatatgagaaacagaatcctgtctttgttattcttacttccgtttatttcggaatcagtgtctgccgccttggtggaagaaaaagattatgtagcttatttgtttacttattttacggggaatcatatcagtgaagaagccgtatgttatggggtaagtatggatggatatacctattatgccctgaataataacaaaccggtgcttgattcaaaagtaatcagttctaccggtggcgtgcgcgaccctcatatcctgagaggagaagacggtcagactttttatatggtactgaccgatatggtgtcggataatggttgggattctaaccgggcaatggtgctgttgaaatctactgacctggtaaactggtcgcactctgtcattaatatacagaaacgttatccggggcaggaaaagctgaaacgtgtatgggctcctcagactatttataataaggaagtagggaagtacatggtctactggtctatgcagtatgccggtggggtagacgtaatttattatgcgtatgccaatgaagattttacggacttggaaggagaaccgaaacctctttttatcccgaaggacaaaaagtcttgtatagacggtgatatcgtgtataaagacggggtataccatcttttctataaaacggaaggacacggtaacggtattaaagtggcaaccactcgttcgctgacttccggagaatgggaagaacaaccggactataaacagcagacaaaggaagcggtggaaggagccggtacgttcaaactgattggacaggacaagtacattctgatgtacgatgtatacatgaagggagcttatcagttcacggaaacaaccgacttgaaaaacttcaaagtgatagatcatgcggtgcagatgaatttccatcctcgtcatggtaccatcattcctattacccgtgcagaattgaagcgcattacagacaaatggggaaaaccggctgaactgggtgaactgccggtaaatccggtattgccgggattccatgcagaccctgaagtgctgtattcacagaaaactcaacgttattacatttattctactacagacggacaaccgggatggggaggatggtattttaccgtattctcttcggctgacttgaaagactggacttacgaaggagtgatgctggatttacgttctccgcaggttccatgggcgaatggaaatgcctgggcaccggctattgaagagaaactgattgatggaaaatataaatatttcttctattatagcggtaacccgaacgatgattcgggcaagaagattggagtcgctgtggcagactctcctataggacctttcaaggatatgggtaaaccgattattacagattctccggtcggacacggacagcagattgatgtggatgtgtttaccgatccggtttccggtaaatcttacttgtactggggtaatggctatatggccggcgctgaactgaacgatgacatggtgtctatcaaaaaggaaacattgaaggtgatgactccgaaaggaggtacattgaaagattatgcgtatcgtgaagcgccatacgtgttctatcgtcagggattgtactatttcttgtggtcggtagatgatacgggttcagcgaactatcatgtggcatacggtacatcggattctccattaggctcgattaaggtagctaaggacccggttgtaatgatacaagacccgtcgaaagaaatttacggtacggcacataattcagtagtccgtaaaccgggtacagatgaatggtatatcgtgtaccatcgtatcaataaaaattacctggataaagacaaagctcctggtgtacaccgcgaagtttgtatcgaccgaatggaatttaatgcggacggcacgattcagcgggtgaaagtttccaaataataatcttaaataaaaccttcttacctatgaaacacctgacacatttggcagccttatgtgcgtgccttaccagttttcctgtatcagcgcatgtgcaggaagtgatgaatgaaccggattcagtatatctgttttcgtatgctaccgtgaacgatgcggggcgtagtggcctgaaattagcctggagtacagatgcaacacgctggttcagtatcggcaacggatatggatacgtgagatgtgattatggcgcctggggagccgagaaacgtatgtttaatcctcatctggtgcgtgatgaaaagggagtatggcactgcttctggcagttgaacgaaagtggaaaagaatggggacatgccacttcgccggatttaatgaagtggaatccgcagacttattatatgcagcctgctcgggatggtgaacaggtcccgaccgtaaaacgaggaagtgaaacgcgtaagaaagctgtagtggaaggtgtattggaacaaggatatgtgcagaaagtggcctgggaagacgtggatcgtctgttgaagttcgtggactatcgggcttacagagaccagttgcacaatgagcgtacagaacaggatgcacaacgttttgccggactggctcctgtatccctgcaattgacggtacgtccggaagaggcgaagcctatcagtgataaattgattggtattttctttgaagatattaattacggagcagatggtggactttatgcggaactggtacagaatcgtgactttgagtattctccgaaggacaatgcacatcagggatttgacagtggctatgcctggagtgtatgggagaacgggcagtcgtcggctgtgaaggtgtcaactgaaaatcctttgcatgagaacaatccgcattatgttgtattgcaggctaagcctggaatggccctccgtaattcaggctttgatggaattacgttgaagaaaggagaaaagtatgatttctctgtcttctctcgtatgcctgaaggaagcaaaggtggaaaggtaatcgtacgcttgctggataatgagggaaaggaagtggcgaaatcttctgtacgggtagcagccggaaaatggaaaaagcagtcggctgtgctgacggctcagactgatgtggatgcagctgtgctttcagtggaaccggaagtgacgggagaattgcatctggatatggtttccttgttccctcaagagacttttaaggggcgtaaaaatggattgagagccgatctggcacagactttggccgatttgcatccgcgctttgtacgtttcccgggcggttgtgtggcacatggaaacggaattgataatatttatcgctggaaaaactcagtgggtccgctggaagcccgtaaaccgatggggaacttgtgggggtatcatcagacattaggtttgggatactttgagtatttccagttctgtgaagatataggagcagagcctcttccagtgctggcggccggtgttccatgtcagaattcagcttgtattccgggaaaacctttgagcggcggacagcagggaggtattcccatggaagagatggatgcatacgtgcaggatattctggacctgatagaatatgccaatggtgacccgaaaaagaataaatgggcaaagatgcgtgcagaagcaggccatccgaaacctttcaacttgaagtacatcggcattggaaacgaggatttgattacgcctatttttgaggagcgttttgaaatgattttcaaggcggtaaaagaaaagtatccggaaatcacggtgattggtacggtcggtcctttctatgaaggtacggattatgaagccggatggaagtttgctacgcgcctgaatgtgccgatggtggatgaacattattataatacaccgggctggtttataaataatcaggattattacgaccgttatgaccgtacaaaacctaaagtgtatttaggagagtacgccgcacatttgccgggacgtcccaataacattgaaacagctttggctgaggcgctgtatctgacttcggtagaacgtaatggtgacatcgtgtcaatgacttcttatgcgcctttgttggccaaggaaggacacactcagtggaaccccgatttgatttatttcaataaccgtgaggtgaaacctaccgtaggttattacacccagcagctttacggacagaattccggagatacttacttgcctgccgaccggaaaatagacaatcctcgtcaggatgtgcagaaacgtatcggtacttctgtggtacgtgacagtaagacgggagattggattgtgaagctggtgaacttgttgccagttccggtaaagacgaaagtggaaggcttgacgcaaactgaaaatggaaaagcagttttgcaggtcttgagtggaaaacctaccgacaaaaatgcacgaccggtgaagaaagatgtatccgtgacagaattgtcgcagtatgaaatgccggcttattctttgagcgtgattcgtataaagtcggacgaaatgacaaaataacactgcttttgaatgatttttaggttataattgattgatttctatttctacggtttggtggtaagtctctatttttgtaaaagagaaaaatgaataccatgaataaattattgagaaaattgtcattaggggtggtttgtcttttgatgacggcttttatctgctcgtgtcaaagtgcgcaaaccggtggaacgtttgaagtggggaaaaatacgttcctgttaaatggaaagccttttgtggtgaaagctgcggaggtgcattatccgcgtattccggaaccttattgggaacagcgtatcctttcttgtaaggctttgggcatgaataccctttgtctgtatgtgttctggaacttgcatgaacagcagccgggtaagtttgatttttccggaaataaagatattgccaaattctgccgcttggcacagaagcatggaatgtacgttattgtacgtccgggtccgtatgtatgtgcagaatgggaaatgggtggattgccctggtggctgttgaagaaagacgatgtgcagttgcgtacgctggatccttattatatggaacgtgttggtattttcatgaatgaagtaggcaagcagttggctgacttgcagatttctcgtggtggaaatattattatggtgcaggtagagaacgaatatggctcgtatggaatagacaaaccgtatgtatcggccattcgtgatttggtgaaaaaagccggctttacagatgtacctttgttccagtgcgactggagttctaacttcaccaacaacgcactggatgatttgctttggaccgtaaactttggtacgggagccaacattgacgagcagttcaagaaactgaaatcactgcgtccggaaactccgataatgtgtagtgaattctggagcggctggttcgaccactggggacggaagcacgagactcgtgatgcggctacaatggtgagcggtatcaaagatatgctggaccgtaatatctctttcagtctttatatgacacacggaggaacaacctttggctggtggggcggtgccaacaatccggcttactcggctatgtgcagctcatacgattatgatgcgcctatcagtgaagctggatggactacaccgaaatacttccagttgcgtgacttgctgaaacagtatcttccggagggagaaaccttgccggaacctccggctcagtatccggtgatttccgtaccggccattacagaatgggaagtcgcgcccttgttcgataatctgcctcaggctaaacagtcggaagatactaagcctatggagcagtttgaccagggctggggaagtatcttgtatcgtacgacattgaaagaagatgtaaaaggtattttgcatattgatgaagtacacgactgggcacaggtctttgctgatggaaaattgctgggccgcttagaccgtcgtcgtggtgagttcactttaccgctgaaagaaaccttgaaaaaaggtacacgtctggatattctggtagaagcgatgggacgtgtgaactttgataagtcaattcatgaccggaaaggtattacgaacaaggtggaagtggtaagcggcgaacaggtgaaggaactgaaaggctgggaagtatacaacttgcctccgttctatgaatttgtcagccagaagaactatcaggcaggcaagccggttgacggacctgcatattataaagctaccttccgtttggataagacaggtgatactttcctggatatgcagacttggggaaaaggtatggtttgggtaaacggacatgctatgggacgtttctgggaaatcggtccgcagcagactttgtatatgccgggttgctggttgaaagaaggagagaatgaaattattgtgctcgacctgaagggaccggctgaagcaaaagtggctggcgtagaaaaaccgattttggatatgctgcgtgaaaaagcaccggaaactcatcgtaaagacggacagaacctgaacttgaaagctgaaaaagtagtaaatgcaggtactttcaaagctggaaacggctggcaggaagtacgttttgcgcagcctgcagcaggacgctatttctgtctggaaggtacttctaactatgaaggaaacaatatcgcagccattgcagagttagatgtgctggataataacggaaagcctgtttctcgtgagaactggaagattgtgtatgccgacagtgaagaaacacgtagtggaaaccgcacggcagataaagtcttcgacttgcaggaaagtactttctggcagacggtagacaataccgcttatcctcatcagattgtcatagatttaggtaaggaatataatgtgaccggtttccggatgttgcctcgtgcagaagccggtgcaccaggtttgataaaggattacaaagtatatgtaaagaaatctgactttacgtattgactttcagttcgtattaagacttaaggtattaaaaggtggaaatatcccatggacggtgagtctgtgggatattttttgtccgtagaaataaaaataaactcattctgctttctttatggcatttttttacgaactttgccgtccaatatgaaacaggtatgcagggaatacttgcatgtgacaaatttgataagatgaataagccaaaagctgtatttagagaaataaacgagagctatacgctacaggaggccatagctgaagcaaaacgttgcttgaattgtaagaatccttcttgcaagaaaggatgtccgatagaaaatcatatcccggagttcattcatgaattgtcaaaaggcaatatgggaaatgccatggcaatcattaatgagaagagtaacctgccggctatttgtggtcgtgtctgtccgcatgaaaagcagtgtcaggggcattgtgtattgtacccgaaagggaagggaatagaaatcggtaagctggaacgctttgtggccgattttgatacggaaatgaaactgattcgcgaaaaactacctcagaagacacggggaaaggttgccgtgattggttcgggacctgccggactgaccgtagccggagacttggctcgtcagggttttaacgtgacaatttttgagagccaggcagaaccgggtggggtgttgatgtatggcattccggaatatcgccttcccaaacaggtggttcgtcaggaaattgagaagattgaagcactgggggtgacttttctgttgaactgtgtggtaggaaagcagctgaacatcgatgatatttttgcgcagggatacgatgctatttttattggttcaggtacggctctgcccaaatcattggatattccgggggccggattgcgtggagtgattcaggcgacttatctgttgcatatggccaatatctataatgaaggcactgttggccgtgataaggtgccggttatcgaaggagagcacgtggcagtgatgggatgcggaaatgtagccatggatgcggcccgtacggccgtacgtatgggagcggccagtgtgaccattgtgtatcgacgtacggaagccgatatgcccgctatacaggcagaatatcaggctgccttgcaggaaggtgtgaaattcttatggcagacttccacgacagagttccttggaaatgaagacgggaaggttgtcggactacgtgccaatacgccggagggagtcaaggagtatgctttcgatcgcatttgcctggctgtgggttcacgtccggccagtcggattgtgtcgactacggaaggcatagaaaccgatgataacgggtatgtactggtgaaagaacgtcctttcggtatgacaagccgtaaaggagtatttgccggaggtgatgtggtgcatcgtccgcaaacggtagtgatggctatgaaagcagcaaagagcgtggcagtgggtatcgcacagtatgtcgatgctgtaaaattgctgagtgaataacctaattataaaataaatactaaagtttaaggactatgccctgataactcaggaaaaagcattaatttcgcgaattcaaatgaaactttagaatttagataccaaaaaaactttacgataatgatggaacttgatttactcacggctgtatcaccgattgacggtcgctacagaagcaaagcaggaactttggctgcttatttttcagaatatgcgctcatgaagtatcgtgtgcgggtggaaattgaatatttcatcactttgtgtgaattgcctttgccgcagctggcgtcatttgatatgactcgttttgagtctcttcgtgatatctaccgtaatttctctgaaggagatgctgcacgtatcaaggaaattgaaagtgtgacaaatcacgatgtgaaagctgttgagtatttcatcaaggaacagtttgataaactgggtggactggaaccttataaagagttcattcacttcggactgacttcacaggatatcaataacacttcagttcctttgtctatcaaggatgcgttggaagaagtctattatccgcagattcagaaactgattgaccagttgactgcctacgcagaagaatggaaaaatattccgatgctggcaaagactcacgggcagcctgcttctcctactcgtctgggcaaggaaatcatggtttttgcttatcgtctgaaccgtcagctggctgtattgaaggcttgtccgttgactgcgaaatttggtggagcaaccggaaattacaatgcacatcacgtggcttatccggattttgactggaaggctttcggtaataagttcgttgctgaaaaattaggtttggaacgtgaagaatatactacacagatttcaaattacgacggactgggtgccatcttcgatgcaatgaagcgtatcaataccatcatgattgacatgaaccgtgacttctggcagtatatttccatggagtatttcaagcagaaaatcaaagcgggtgaggtcggctcaagtgccatgccgcataaggtgaacccgattgactttgagaatgcagaaggtaacctgggaatggccaatgcaatattggagcatctttcttccaaattgccggtctctcgtttgcagcgtgacttgacggactctacagtgttgcgtaatatcggtgttcctttcggacatacggtgattgccatccagagctcactgaaaggtcttggaaaattgctgttgaatgaacataaaatctatgaagatctcgataattgctggagcgtagtggctgaagctattcagacgattttgcgccgtgaagcttatccacatccgtatgaagcgttgaaagcgctgactcgtacgaaccaggctattacagaagcttcaatcaaagattttattgaaacactgaacgtcagcgaggatattaaaaaggaattgcgtgcgattactccgcacaactatactggagtctaactttaaaaaataaatatcgcccgagagggtgttgagtattaatattagcattaaacaaaaaaattatggcagaaaaagaattcagacaagatggcgaaaacagccagtctggccgcgatggttacaagtcttacaacagagaaggatataacaaatatggtagaggcgagaaaagcaacagctacggtcgccgtccgtataacaacaatagagaagggggagaaggttatcgttcttcttataatcctcgctttaataatggagaggaccgtccgcagagaggtggttacggtaatcgcccgcagcgttcatacggaaaccgctcctacaataatgaaggaggagagcagcgttcttcttacaatcctcgttttaacaacaataatggtggacgtccgcagcgtgcatacactcctcgtttcaacaacaaccaggaaggaggagaacagcgttcatatcgcccgcgctttaataatgcacaacagggtggagaacagcgtccgtatcgtcctcgttttaacaacaatggcggacagcagggtggatatggtcgtccacagggaggttaccgtccgcgtactgccgactacaacccgaatgcaaaatatagtatgaagaagcagatcgagtacaaagaactgctgactgatccggatgagccgattcgtttgaacaagttccttgcgaatgcaggtatctgctctcgtcgtgaagcggatgagtttatcactgcaggagtagtatctgtaaatggtgaaatcgtaacggaactgggtacaaaggtgaagcgttcggatgaggtgaagttccacgatcagccggtaaatattgagcgtaaggtatatgtactgcttaataaaccgaaagattgcgtaacgacttcggatgacccgcaggaacgtaagacggtgatggatttcgtgaaaggtgcttgcaaggagcgtatctatccggtaggacgtctggaccgtaataccacaggtgtactgctgttgacaaatgacggtgacttggcatcgaaactgactcatcctaagttcttgaagaagaaaatttatcatgtatactgcgacaagaatgtgacaaaggcagacttggatcagattgtacagggtattacactggatgatggtgaaatccatgctgatgctatcagctacgcgtcggatacagacaagtcgcaggtgggtattgaaattcactctggaaagaaccgtatcgtacgtcgtattttcgaatcgctgggctatcgtgtgattaagctggaccgtgtgtactttgcgggattgaccaagaagggattgcgtcgcggtgactggcgttacctcacagaacaggaagtggccatgcttcgtatgggatcttttgaataatgataaatatagcagaacacagggatacacggaaacggagcatccctgtgtttttagattaattgataaaacatagaatcaaaatggaaacaattcgtagaacaaaaattgttgacctgctgaagcgtgaagattttggcgcgatggtcaatgtgaaaggttgggtgcgtactcgccgtggtagcaaacaggtaaactttattgcattgaatgatggttctactataaataatgtgcagattgtagtcgacttagctaattttgatgaagagttgctgaagttgattacaacgggtgcatgtctgagcgtgaatggagaactggtaaaatcggtaggctccggacaggcagcagaaattcaggcacgtgagattgaagtattgggtacttgtgacaatacttatccattgcagaaaaaaggacattcaatggagttcttgcgtgagattgctcacttgcgtcctcgtacgaatacgtttggtgcagtgttccgtatccgtcataacatggctattgcgattcataagttcttccatgaaagaggtttcttctatttccacactcctctgattacagcatcagactgtgaaggtgccggacagatgttccaggttactaccatgaacctctatgatttgaagaaagatgaaaacggttctattatttatgataatgacttcttcggaaagcaggcaagtctgacagtttccggacagttggaaggtgaattggctgctactgctttgggagcaatttatacattcggaccgacattccgtgcggaaaattcaaatacaccgcgtcatttggctgagttctggatgattgaaccggaagtagctttcaatgacatcaatgacaacatggatttggcagaagaattcatcaaatactgtgtacagtgggcattggacaactgttatgacgatgtgaagttcttgaacgatatgtttgataagggcttgattgaacgtctgcagggggtattgaaggaatcatttgtacgtctgccttatacagaaggtatcaagattctggaagaagcagtagctaatggacataagtttgaattcccggtttactggggcgtggatttggcttcagaacacgaacgcttcctggtggaagagcacttcaaacgtccggttatcttgaccgattatccgaaagaaatcaaggcgttctatatgaaacagaacgaagatggcaagactgtacgtgctatggatgtgctgttcccgaagattggcgaaattatcggaggttcagagcgtgaagcagattatgacaaactgctgactcgtattcaggaactgaatatcccgatgaaggatatgtggtggtatctggatacccgtaagtacggttcatgtcctcattctggattcggattaggctttgaacgtctgctgttgtttgtaacgggcatggccaatatccgcgacgtgataccgttcccgcgtacaccgcgtaatgctgaattctaaaagagaattgtatacaggaaaaagtcattccatgcgggatgactttttttgtgtgtttgcgatagaaaaatgtacataaaatgcgtgattctcaaattattttataattttgtaggtacctgataggtaattctaatacttttagttatgaaaatacgttatttttttctggtagcatttctaatgctcttagctgtcggcaattcgatggcccaggctgtgcaggagaagactcccgtcaatttgcagggagtttggcagatgtgtttctatcgttctaattctccggatataccgggtgaacttaagacaagtaattccttgaagattctttctgacgacggacgctttatcaatttgttgatgatgcagacgggagccgttattttgggatatggaacttatgagatgaatagtgaaggagtatatacggaatgtgtggagaaaaatgtgcatcttcctcaattgaatggaaagaaaaatgaaatgcactttgatttgaaagaaaacggtacgttgatgtatgtgaagtatttcctggagagcgatgccaacgggaataagattgattcctggtgtcatgaaatctggaagaaagtagagatgtcaccggtttatccgggcgatgagttacgttgacggaaatgagataataaaccgggaaaaggccgttgcgacaggatgtccgtaacggcctttccttgttttatggcattaaagtgtgattcataatcaatcggttatcccgcgaaaaaaagcttaaaatctttgtcggttaaaagaaaaaccgtacctttgtaagccgattattatcaactagtgataaatttttaattctgagtgctttatccttctttgtccgggaagaatagggaggtaggaatttgttttttagtagttaacattttaaaaaagatttaagagtggatactttaagttacaagaccatttctgcaaacaaggaaacagcaactaaagaatgggttgttgtggatgctaccgatcaggttgtaggccgtctcggtgcgaaagttgcaaagttgttgagaggtaagtacaaacctaacttcacccctcacgtagactgcggtgataacgtaattatcatcaatgcagacaaagtgaaatttacaggtaagaaaatgaccgacaaggtttacctgagctataccggctatcctggtggccagcgtgagattactccggctcgtctgttggcgaaaccgaatggcgctgaaaaattgatgaaaagagtagtaaaaggtatgcttcctaagaatcgtctgggagctaagttgctgggtaacttgtatgtttacgaaggaagtgaacacaaacacgaagcccagaccccgaaagtaattgatattaattcacttaaataataaagaatggaagtagtaaatgcattaggcagacgtaaaagcgcagtagctcgcgttttcgtaagcgaaggtacaggaaagattactattaacaagagagaccttgcacagtactttccatcaactattctgcagtatgtagttaaacagccgttgaacaaattggaagtggctgaaaaatatgatatcaaagttaacttgtgcggtggtggtttcactggtcagtctcaggctttgcgtctggctatcgctcgtgcactggttaaaatcaatccggaagataagaaggctcttcgttctgaaggtttcatgactcgcgattctcgttctgttgaacgtaagaaaccgggacgtccgaaagcacgtcgtagattccagttcagtaaacgttaacgaggggacaagttggataagggacaagttagcaaggtggttcactcggtgggtctgtccttgttgcctcgtcaactgatacctcgtcacctaaagaagcgtttagtatctaaactgtcaggattcttcctgcaagctcttgtcggaaagactaccgggcagttggttcaataaacaaaaaagaaagtaaacgattaaaattaaaaacaatgtcaagagtaaattttgatacattattggaggctggttgccacttcggacaccttaaaagaaagtggaaccctgcaatggctccttatattttcatggaacgcaacggtattcatatcatcgatttgaacaaaactgttgctaaagttgaagaagctgctgaagctttgaaacaaatcgcaaaatcaggaaagaaaatcctgttcgttgctactaagaaacaagctaaacaagttgtagctgagaaagctgcttctgtaaatatgccgtacgtaatcgaacgttggccgggtggtatgttgactaacttcccgacaatccgtaaggctgtgaagaaaatggctactatcgacaaattgacaaacgatggtacttactcaaacttgtcaaagagagaagttcttcagatttctcgtcagcgtgctaagttggaaaagaacttgggttctatcgctgatttgactcgtctgccgtctgcattgttcgtagtagacgtattgaaagaaaacatcgcagttcgtgaagctaaccgtctgggtattcctgtatttgctatcgtagatactaactcagatccttcaaacatcgatttcgtaattccggcaaacgatgacgctactaaatcagtagaagttatcttggatgcttgctgcgctgcaatggcagaaggcttggaagaaagaaaagctgaaaaggtagatatggaagctgctggtgaaaatgcaccgaaagctgctaagaaaaaagctaccaaagctcgcatggataaagctgaagaagatgcaatcaacgcatctaaggctgctgcgttcatgagcaaggatgaagaagaagcttaatcaataaagtaagttgagaattgaaaattgaaaattgggaaaactgtattctcaattctcaattctcaattctcaactttgtttttaagaacattactaactcaaaataaaagatattattatggctgtaagtatggctgatatcaccaagcttcgtaaaatgactggagctggtatgatggactgtaagaacgctttggcagaatcagaaggcgatttcgacaaagcaatggaaattatccgtaaaaaaggacaggctgtagctgcaaaacgttctgaccgtgaaacttcagaaggttgcgtgttggcaaaatcaactggtgactacgctgcaatgattgctttgaagtgtgaaactgacttcgttgcaaagaacgcagatttcgtagcattgactcaggctatcctggatgctgctatcgctaataagtgccagactttggatgaaatcaaggctttgcctatgggtaacggtactattgctgatgcaattgtagaacgtagtggtatcactggtgaaaagactgaattggatggtttcaatttcgtatcaggtgcttgcactgctgtttacaaccacatgaataagaatcagctttgtacaatcgttgcattcaacaaagaatgcgatgctcaggtagctcatgaaatctgtatgcagattgctgccatgaacccgattgcaattgatgaagctggtgttcctgaatctgtaaaacaggaagaaatcaatgtagctattgaaaagactaaggctgaacaggtacagaaagctgttgaagctgctttgaagaaagctggtatcaatccttctcacgtagatagcgaagagcacatggaaagcaacatggctaagggatggattactgctgaagatgtagctaaagctaaagaaatcaaggaaaaagtagctgcagaaaaagctgctaacttgcctgaggctatgattgaaaatatcgcaaaaggccgtctgggtaaattcttgaaagaagtttgcttgctgaaacaggaaagcatcatggatccgaagaagactgttgctgatgtattgaaagctgctgatccggaactggctgttgcagacttcaaacgtttcactttgcgtgctgaataatttattaggatgcaatattctttcgggcgtgccttttggtacgcccgatttgttttacggttacttggttcaagtagccgttttttattgattattatcaggaaaagtaatcttccaagcaggattattttgtatttttgctgtcggaaaacatagaatggaattctaacttttaaacaaaatagattatggcaaagaaagcgcttttaatgattctggacggttggggttgtggcgaccgtcaaaaagatgatgtaatcttcaatactccgactccttactgggacagtctgttggctaactatcctcattcacagctgcaggccagcggtgaaaatgtaggtttgcctgacggccagatgggtaactcggaagtaggtcacttgaacatcggtgcaggccgtatcgtatatcaggatttggtgaagattaaccgtgcatgtgccgacaacagcattatgcagaacaaggaagtagtagctgctttctcatacgcaaaagaacatggaaaaaacatccacttcatgggattgacttccaatggtggtgtacactcttctttggaacacttgttcaaattgtgtgacattgcaaaggaatacggactggaaaatactttcatccactgcttcatggacggtcgtgatacagacccgaagagcggtaagggattcattgaacagctgactgctcattgcgaaaaatcagctggaaagattgcttctatcgtaggacgtttctatgcaatggaccgtgacaaacgttgggcacgtgtgaaagaagcatacgatttgctggtaaatggtataggtaagaaagctaccgacatggtacaggctatgcaggaatcatacgatgaaggtgtaacagacgaattcatcaaaccgatttctactgcaaacttcgacggtactatcaaggaaggtgatgtagttatcttcttcaactaccgtaacgaccgtgcaaaagaattgactatcgtattgactcagcaggatatgccggaagaaggcatgaagaccatcccgggattgcagtactactgtatgactccgtatgatgcttcattcaaaggtgtacatatcttgttcgacaaggaaaacgtacagaatacattgggcgaataccttgcaagcaatggcaagactcagctgcacatcgcagaaactgaaaaatatgcccatgtaaccttcttcttcaacggtggacgtgaaactccgtatgacaacgaagaccgtatcctggttccttcaccgaaggtagctacttacgacttgaagccggaaatgagcgcatacgaagtaaaagataaactggtagaagctatcggtacacagaaatatgacttcatcgtagtgaactatgcaaacggtgacatggtaggtcatacaggtatctatgaagcaattgaaaaggctgtagtagctatcgacaattgtgtgaaagatacagtagaagctgctaaggctaacggttatgaagtcatcatcattgctgaccacggaaatgcagatcatgcattgaatgaagacggtacaccgaacacagctcactctttgaatccggttccgtttgtatatgtaactgaaaacaaagacgccaaagtagaaaatggtgtattggccgatgttgctccttctatcctgcacattttgggtatggcacagccgtctgaaatgacaggtcgcgacctgattaaataagaatccacagtgatttagaatatagagccggggttcgttatcggaagataatggactccggtttttttatgcgttatgccagtacaatgatacttcagatagtaggaacgctggtaatgcagtcttggacaaaataaaaagccgcaaagtaaataaaaggaattactttgcggctttctgtcaaaacagagtttattatgcttttactccgttgtattcatcagatacagttaattttttgcggcctttagcgcgacgtgctgccaatactcggcgaccgtttgcggtagccattctttcacggaaaccgtgtttgtttcttctctttctgttagagggttggaatgttcttttcattttcgtatatactattttatgttattattccatgcgttcgggctgcaaaattagtgacttttttttaataatcaaagtgctaaatcatttttagacaaatctttttgcgttttttcgcgatttagattaattttgcaaccgtattcagagaataaatcaaactattacataataataaaggatttaagttatgattaatgctcaagacattaaaatcggaaccgctatccgtatggatggcaaattgtatttctgcattgacttcctgcatgtaaaaccgggtaaaggaaacactttcatgcgtacaaaactgaaagatgtggtagacggatatgtattggaacgtcgtttcaacatcggtgaaaaactggaagatgtacgtgtagaacgtcgtccttatcagttcttgtacaaagaaggtgatgattatattttcatgaaccaggaaactttcgaacaggtgcctatcgctcatgacctgattgaaggtgtagacttcctgaaagaagaaatgattgtagaagttgtttctgatgcttctactgaaactatcttgttcgcagaattgccggtaaaagttcagctgaaggttacttacactgaaccgggtctgaaaggtgatactgctactaacgctactaagcctgctactgtagaaactggagctacagtacgtgttccgttgttcatcaaccaggatgaaactatcgaagtagatactcgcgacggttcttacgtaggtcgtgtaaaagcttaatgctgacagacactgaatttcagataaaaaaagaaagccgtactggatgattccggtgcggctttctttttgtcgtttatcgataatgtaagtagtctatatctacatatccagattcacttttgtcgttgaagcaatagatgccgatgcggtctccccgatagtttccccataccatttgatacggttctccaaactgaatgaaattatctccgtccaggctgtaataatattgtgatttcccatccattccccaacaagttttgaaccagacaaacgaagtagaaatttcgtttccttttaggatgtggccattattccgatactcgataaaatactgcgttccttcttttaccacaccaagagccgaatgatgagaggaaaagtggcaaattccatttctttgtccgtcggccatctgtgaaatgtccattttcacaatcacttcgttatcttgtttccggaatgtacgctgtgtaagcgtgtttcccgcttttaggagttgattactttctatcgggcggaaagctttcagacgcatccatccgggacgttctgtcagagaaaagaaatcttttcgaggctggtagttccattgccattgtggacctagtatttcgctgtcaaagtcatcacttcttaaaagtgtcagtttcggtgatgagaaggctggcatgggagcttcccattgcatggtgccgatttgctgtggcagaacttttccgatgagcggccagccgtctatccatataacggggagcagactgacaattcgcccgctccagtcgcctgtaccgtgatgagtcagaaaataccatttcccgtcttttccttgtatgatgcctccctgattgggctccatggcttctctgctggctagtgcaagctgtttttcttctttataaggtccaaatagctttttggagcgccttgccatcacgtatcgtcctgttcccggtttgtgctcactgaaaaccagataataccattctccaacttttatcagtttattggcttcccttccgtttcctgaatgaataagcttggccgattttctgttgatactttttccgtcttttgccatggggaagagataagtcttgtatccgtccgcgaaatgagtccctacgaaacaagctttcccgtcttcatcccagatggccgtgcagtcatcccagcctgcttccagcaagagaggggtaagtggttcccaaggtccttcgggtttggaagaggaagtcataaagtatccttcatccggtgtgccgaagaacaggtaaaagcgtccattatggtaacgcaaggtacccgcccatactccccgtgcatagcggtccatctggtcccagttcaatttggttcctatttgtgtcaggtcactgataatattcccacagaactcccagtttacgaggtctttggagtgtagcagggtcatacctggagaaaattggaaagtagaagaaatggcatagtaatcgtctcctacctgaatgcagtctatgtcactgtaatcagccggaatgatgggattgcgataggtgccatcattttgttctccccatttttcccagtttccccatacgggattggattcattagaggtgttttgagcagtaacgtcacctagaatacaaaaaccggttatcaggccgacatataaaatccgttgtatcataaaagtttaattccttttcctccttttaatgtaatgttttttacctttccgttgaagcagactttcgtctttccgcctttgcgtgactggatgtacaaggatgtgactttattgtctttccattccatgtcgacgatgaatcctccacgggcacagatacctttcacgctgccgtccttccattcctccggaagagccggaagcagagtgatactgttctcggaagattgcatcagcatttcaatgacgccggcgcaaccgccaaagttaccgtcaatctggaaaggcgagtgtgcatcgagcaggttggggtaggtacctcctccgcgtcgtgcatcctttcctttgtatccgtccggactgacataacgcagcaggcgacggtaaatgtggtacgcatttttgctgtcttgcaggcgtgcataaaggttgacacgccagccggtgctccagcccgtagtattgtcgcctttgatttccagcgtacaggcacaggcctttgccagttccggagtttcttttacagacagatgatgtcccggatacaaaccgaacagatgcgactgatgacggtgttgcggttcctggtcttcccagtcgtggaaccattcctgtaggttacctttcttgccaacctggtaaggcagcaggcggggaagcgtcttctctatctgcttccggaaggttttgtctgtacctaatgcttcggcagccttggccgcatctatcaggcattcacgtgtcatagccaggtcggaagtacagccgtaggaagtagctcctgcgtagccgtcgggagtcaggaacttgttttcgggcgatgtacccggtgaagtaatcagcttgccgtctttttctatcagccagttcaggcagaattcggctgcacctttcaataccggataatattgctgtagaaattccttgtcctgcgtgaaggtgtagcgttcccagatatgagtagacagccaggcgcctcccatggtccagcatgcccacgacgggtcacccacgttcaatcctaccggacaggtcatggcccagatgtccgtattctgtcccagacaccatcctttctgtacgccgtaataagccttggcactctcttctcccgtgtgttgcaggttggcgatgaagtccatcagtgggcggtgcatttcactcagattggccgtttcagctgcccagtagttctcctccaggttgatgttgctggtatagttgcagctccagggcgggagcaggcgttcgttccacagaccttgcaggttggcgggtactcccggtgtacgtgaactggaaatgagcaggtagcggccatattgaaaatacaatgcttccagttccggattcctttgtgacttgtctgtatattgcaatagctgttcgtcggtaggcagggctgcaatggcctggtctgtcttacctaggcaaagtcccacgcggtcgaagaaagacttgtagtctgtcacgtgtgcattctccaattcctcgaacgttttctgtgctgcccgttccatgcgtcgtgttaccaggttccggtagtcgcgtccttctttcatggggtccttgtcgaagccgttgaagctggtgacgttggctatcagaatcaaggcttcttttccgcctttcaccttcagctcgcccgatggaaagcttttgacctcactctgaggagctatgacccgaatcagtgtgcggaaatgcgttccccgttccggatcatacaaatgcttgttgtttactccgtcaaaatatacgggataggagtgataggcagcatatccttcggctgaaatctcattgccgttggccgtagtggcatgaggcaggagcgagttgaatgaaagagtggcttgcagcccttgtgcgctttccgtctgcaggcgcagtacaatcactgagtcgggggctgaagcaaaataatcacaggcaaaatctgcaccgtttctctggtaggcggttcgtgccatggcccggctgatgtccagtgtccgttgatagtggcttatcttagccggttcggcagaataagtgatggaaagttggcccagcggctgatagttttcgctgtagtgtccttgaacctttcgttgggcacggtcggctccccggtaatcttccttgtcgagcaaggcacggatttccggaatagccttgtaggcatcgggagttgtgactttccggtcgggttctccggtccatagggtgatgtcgttcagatagagtacgtctttgtcggtgcctccgtaaagaatagctcccatcgtaccgtttccgatgacgagagcttcttcaaagaattcagcaggacggttgtagtgcagcactaagttttcttgtgctgtaagataagaggtcggtaaggaaaggatataagctgtaatcatggcacctttccaccttcttgcaaagttacttttcatagtctatgtgtgaataaagaaatcagttgcaagttatcaagaaatctttatatgggcaaagttcaagcatgaaaagtaaggtgaaaaatgccgatgaaaaaacgcccttgcgttttatctcaaacgcaagtacatttgagatgaaacgcaaggacgtttgcattaaaacgtaaaggcgttttgtcttaaactctttggcgttttgaacggaacgcaaaagagttttgtggagagtttttaatttcttccgaaaccccataaaaaaagcctttccatcatcgcgatgaaaaggcttctttttattctttccagaaaaataatcaattattttttcttgtggtttgcataacggctcatgaacttgtccacacgtcctgcagtatccaccagcttagacttaccagtgtagaacgggtgagatgagctagagatttccagcttaaccaacggataagtttctccttcgaattcaattgtgtctttagtagcacaagttgaacgagacaggaacatgtcgccgtttgacatgtctttaaatactaccggacggtagttttcaggatgaatgccttttttcattttagtatatactttttattgttattattgacaaataaatatgtggtaacactggtaaagtgtgtaatggtctatttcgggttgcaaagatacgctatttctttgaaactaaaaagaaatacccgaaaaaaatattctgtcactcaaaggcttttatataataggtaaatcagtttttgtcatatctactttgcatccttgccgcatgttatggtaaatattccgcttaaaattgatttgcctcaagaaaagacagaaaatctccgatttagtatattgctaattctttttatattgttacttttgcagatggaattaattactaacaattataaaacttacaaaaatggttaattacaaagagttaggcttggtgaacacaagagatatgtttgccagagcaatcaaaggtggatatgctatccctgctttcaacttcaacaatatggaacagctgcaggccatcgtgaaggctgctgtagaaacaaaatctccggttatcttgcaggtatctaaaggtgctcgtaactatgctaaccagactttgttgcgttacatggcagaaggtgctgtagaatatgcaaaagaattgggttgcgcacatcctgaaatcgtgcttcaccttgaccacggagattcattcgaattgtgcaaatcttgcatcgacatgggattctcttcagtaatgatcgacggttctcacttgccatacgaagaaaacgtagctttgaccaagaaagtggttgactacgctcatcagttcgatgtaactgtagaaggtgaactgggtgtgctggctggtgtggaagatgaagtttctgcagaacaccacacttatactaaccctgaagaagtaatcgacttcgctacccgtacaggctgcgattcactggctatctcaatcggtacttctcacggtgcttacaagttcaaacccgaacagtgccacgttgatccggctacaggccgtctggttcctcctccattggaatttgccgtactggatgctgtaatggaaaaactgccgggattccctatcgttcttcacggttcttcttcagttcctcaggaagaagtggatactatcaacaagttcggtggcaagctggaagctgctatcggtattcctgaagaccagttgcgcaaggctgccaagtctgcagtttgcaagattaacatcgactcagactctcgtctggccatgacagctgccatccgtaaggtgttcgctgaaaaaccggctgaattcgacccgcgtaaatacctgggtccggctcgtgacaacatggaaaaactttacaagcacaaaatcatcaacgtattgggttctgacaacaagttggctcagtgctaattgcgcttgatacttattacacctgaataaaatgaatgaaggctgctttcctttcggaaggcagcctttttttgagttcttaccagaatttgttctgagaagggttatattcaaatcctgcttctttcaaacggttcagaatatcttccttgctcacgttcatgtctgcacaaagggcatcgagcgaaggataatagtctcttaacttcatgttgatgaagctgaaaagcatcatcgggtctttaggtaattccatattgataaataattttcgatgtattcttttttcggggtgcaaagttacgacttttattgcttcattaatcctatttaattgataatttatttgttatctttgtcccgttatgtcaactaaacgaattatagaagataaagatttccaccgtattgtgattgccacacgccggggagcaagaaacattacgatgcgtgtcaagcccgacggcctgtatctcacggtgccgccttacagcaagacggacaaagtgctttctaccctggagcagtttcgtgccgatttacgggaacgctttcggcaggtggcggtacggccaatcgatttcagttttcggattgaggccgactgttttcgtttgtcattgtcttccagtcacctgaaatgtttcacggtgcggcagatgccttcgggtgaggtgaccgtgttctgtccggaacataccgacttttcggatgaagcggttcagaaactggtgcgtggggctattttgcgtgccatgaaaaaagtggcggctgagtttctgccacccttgctgagtgtgtgggcagaacgcttcgggttgacttaccgaaaagtacggattaccgctgcccgttcacgatggggaagttgtacttcagctaaaaccatcagtttgtcctgttacctgatgttagttccctctcacctgattgattatgttattttgcatgagctggctcacacacgtgaaatgaaccatggccctcgtttttgggaactgcttgacagcatgacggcagggcaggccttacgtttgcggggagaacttcggaggttccggccatctttttaaaaagaatttcaaacatgtgtataatgtacactttttgatgtaattttgtaccgtagaagataggtaacaggtaaaaaagattgtttgcatgaaaaaaagtttactggcacttgcctccggtacactcgggttaggtattgctgagtttgtgatgatgggaatactgcccaatgtggctcgtgatttgagtatcagcataccggaagccggacattttatttcggcgtatgccataggagtttgtgtgggagcacccttgacggtgtttgtggctcgtacgcgtccgttgaaacagatattgttaggacttgctgccatttatgtgattggtaatttgtgtgcggcgcttgctccggaatattggacattgctgcttatgcggtttgtgtcgggactgcctcacggagcatttttcggagtcggttctattgtagccgagagggtggccgataaagggaaaacctcgcaagctgtagccctgatgattgccggtatgaccattgccaatttgtttggagtgcccttgggtacattgttgagcaatctgttctcctggcggttccccttcctgttcaatggatgctggggaatgctggtattcttcctcgtctggaaatggatacctgttttacccgccttgccggatgtgggctggaaaggacagttccgctttttgcgcaagttagctccgtggctgattatcctgaccacgatgtttggcaacgggggagtattttgctggttcagctacgtcactccgcagatgctgcatgaagcgggtttccaaccggaaagtctgacatggattatgatgctggccggattggggatgactatcggtaacctggtaggaggacgatgtggcgatttgtacggactggcaccggtgattcagtttacgcaggtatttatgatgctagctttgctgggcacgtttctgtttgcaggagtaccttggctttccgtattgctgatgtttatttgtgcggcagccttgtttgcggtgtctcctcctcagcaattgttgttgctgcagaactccagaagaagcgaaatgatgggagcggcttgtgtgcagattgctttcaatttgggaaatgcggtaggagcatatgccggaggacttccgattgatgcaggattaggttatcgctatccggcactggtaggagtctttgtggtggctttaggatgggtctgcgttacctggtatatccggagagaacgcaggcattttataaatgaaccgatacgattgtaacataaatatgctatgagactacttttgttgactttatgtattattttatttggggggaatacgctacgcctggaagcgaagaaatatttcttctcaaattataatttctgtcatataacggaggaagccgggttgcctaataactcggtgactgccgtaatgaaagattcattcggatatatctgggtggccactcaggacgggctggcgcgttacgacggctatcgtttcctgagttatggggtgaaggaacctctttaccgcttgaaaggaaactatgtctacacattgtgcgaggatcgccagaaaaggctctgggtaggttcggatgccggacttgacctgattgacctacagacaggtctttctttgcccgcgtctgatttaggagcagtatcggaattatcatctttgtttaattcgtttgtccgttcggtggtacagactaccgatggaaatatatgggtagtaaccgacaagatgctgtggtgtctggaactggactcttcaggagtcgtgacggctttttatcggatgcaagctgaagccgatgagagtgtatcggccattgcggagattgaaggaggactttgtgccggagtaggtaactgtatttaccggattgtgaaagaaggaggaaataagttgcgtaaacagcagctttcggatgccattgtaccttttagtgatgactggcgtatctcttgtctgcaagccgacggcgatttcttgtggataggcagtaatcgtggacttttccgctattaccggcaaaccaagacgatgaagcgttaccgttactcttcgcatcgggaagggatgctcagtcaggcttatatcacggacatgaagctgacttccgacggcagtctggtggtttccactttcaacggtctgaatgtatatgaccgtgaatccgatacattttcttttatccgtcgggtggaagattccgaagaacgaggattgaattccaatatcatagtctgtctgtttaccgacgggcaggacatctgggccggtacacaggatggaggagtcaatctgttgtacttgtcgcgcaggttagaggttgccagattaggggatattccctggaaactttcggcagggcgcacaccgcaaatcagtgctgtgacggaagataaaaagggaaatttgtggattggtacgattgagggaggactttatcagatgaacccagaaacggaagcagtgcagcattacgctttcacccctcatagctcgacatctattctttccaataatgtgaatggcatattgatagacagtgataatcatctgtgggtttatacttggggggctggaattagtgagctggatttgaataaacctcattctgtctttcgtcagcattccaatggagaagtgccagggctggaggatgattttattatgagtgcggtggaagattctgtcaacaggggtatttggtttggaacgacacatggattattgttttatgataaaaagcaggagctatttagccgggtggattttgattccagtgtgagtgagttcgaatcagtaggttctttgtgtgtagatcggaaaggacgattgtgggtgggtacttctgagggggtatttattgttgatctgttttctttcgcccgttcgcgtcggcattttaattatatttatttacgctataagttgaatgatgagaaatctacgcaggtagagcgagtcaatgtggtttttcaagatcgtcgtggcgaaatctggttaggaggaaaagccacaggactttatcatttaatatcggataaagcaaaccgttttcagtttaagcattatggaaaagaagaaggcttttatgaaaatacggtttatggcttatccgaagatggaacaggtaatttatggattgctacagagaatggattattccgtttgctggtagatagtgatacttttgtcttatacggaaagtctgatggtattttggacaaagattatgattcacatacattgcatttctcatcacgttataaacgcttgtattgcgggaaagatcatggattgtgtgaagtgattttgaagaaaataccaaaatcggtcaaggaacgtacagttgttatttcttcttgccgtgtgaatggtgaaaactggacttatgagacttcgaaaaggctgtctgatttgggggaagggaataaactggaacttgctttgaccactttggagtatggatacaacgaggcggttcggattcgttacagagaaaaacagaatggagaggaatgggtggaacttcctgcagataatccggtgattgctttgccttcacttccgggaggacaattccaattggaaatacaagctacagatcaggagggaagatggcaagatgacatattggatataaatattcaggtacgtccttattattataagtcgtggtggttctggtcgttacttttgcttgttgcaggatgtttgtccgtagccttttatcgttataaagtacggcagttaaaacatcgtcaggtattattgaaacaattagtagcccagcgcacacacgaactggaaatacagaaccgtagtctggaagtaatggctcatcatgtagaggaagttgcagaagaaaaaatacgtttttttacgcatattacccatgagttccgtacaccggttacattgattcacggacctattcagcaggcattggcactgacttcagataaggaggtaaaggagcagcttcacatagccgaacgtaatgtagaagatttattgtcattggtgaatgaattaatggatttccgtaaacttgatatggaaaaggtgcaattgaacatccggccatttaacttgatttctatggttgaagacttattggcaccttttgtctcctttgtgaaagaacgtcatattgtattacgcacgtattatcgtcttcagggactttctgtaaatgctgaccctaaatatcttcatcgtgtgctgacaaatctattggctaatgctgtgaaatttacgcctgatgggggtgttataagcctttatgtggccagagtagtagattatgagagaaaggtgcagctttatctgtcggtatcggatactggatgtggaattccggaaaaagatttacctaaaatttttgatagtttttttcaagcacagaacactgtggcttatcctgttttcggacagacgggcacaggtataggactgaatatttgtaagcggattatcacgcttcatgggggagtgatatctgctcggaacaaccattctggaggtacctcttttagaatattgctaccgatgaaagacatgccggtaaaggagcatgaaactgttgtagaaaggcatttggatgaagaaaacatgtcattggtgaaaccagcttcatcggcacatgaaaccctactgatagtggatgacaactctgatatgcgccgttatatctgttctttactgaaacaagaatataagcttttagaggcagaaaatgggaaaaaagctatagacataataaaaaatgagcatgtagacttgattattagtgatttgcttatgcctgaaatggatgggctggaactatcgaaaagagtaaaggcaaatttagagaccagtcacattccttttctaattcttacggcagtgtgctcggaggagaatgagaaaatctgctattcagtaggggttgatgaatatttgtgtaaaccttttgatgcagaagttcttaaatatcgtattcgtaacattctggctttgcgtcgtggttatcaggagaaactttcaaaacctgctgctctggcattgacagatgtgagtgatcttggattgatagaagagtccagagataaggcctttatggatcgggctatcgccttgatgaaagagcactatgcagagtctgaatatgggctggatgcttttattcgtgacatgggatatagtaagacattggttaaccagaagatgcagaatctggcaggaattcctatcggacagtttatgaagaactttaggttggatatgggctatcagttgctgaaacagaaaaaaggagataccaatgtgtctgaagttgcttatgcagtaggtttcaatgacccaaagtatttcacaaaatgttttaagcaacgttttggctgcttgccaagttctgtggggcattcgtagggcaaaaaagagaggccatctcaaacttatgttgagacagcctcttaaaaaaaggaatttagaaatgtaccgtttcacaacggcatttttaaaaacacttggggctatttttgaattaccccagctgtattttccaagtgtatattttctgcagcataatcaggacgggtatctccccaattgactgtacatccttccatttggatgtcggatgctgtgtggaagaagaatccatacgtttttccttttagaaagccttctccgtcgcatggacgcttatcgtataccccaccttcaaaagtggtccgtttgtggagatttacttctacctggtcaaaataaattcggttgattttgtctatcgtatctccactgacaaatattccgttttcacttgtacatttgatattgtggaaataaatacggctgacttctccacaagcaccttttacggctcctttcgggaaacgccatccggcatctttatgatttcctactgcacgtgggaaagatgtgacgtaaatcggttctgcttttccccaccatacatcagagaagaagcggcagtctacaatcatatttgagaatatgacgttggtaactgtaccttcatcacggttttgaatacctatgccccggttgctgtctttgatgatgcaattagtgaataacacattgttgattttgtccatgttttccgaaccgatttttacggcgcatgaacgtgaagtcatggtgcagttggtcactaccacgtcttcacagcttccatactgttcaaattcacgtcggttcttcagacagatacagtcatctcctgattcgatgaagcagttggaaatacgtacgtctttggagtggtctatatcaattccgtcaccattacgtattttcaggtcattaagaatgctgataccatcaatcattacattgttgcaacctattaagtgtacagtccagtaagcgctgttgcagatgttcacatcacgtatgacaagtttttctatgttggtcagtgtcagaacatgtggacgcgggtcgaaatcggtgacaggtttcaactcataagaatcttccagttcctttcccatgaatgcaactccgtttccgtcaatgcttccagttccggtgattgatacatttttcaggtcctttccactaatccacatcatgccttctcctcggttggcaccgaatgcactttctgtatagatgctttcgtctggatttgccagcaaacgggagttaggggccagttgtagctctacgtaagaagctaacttaaatggtccgcaaagaaacgtatgcccggatggaacaagcactgttcctccgcctgcttccgaacaagtattaatagctttctgaatggctgaggcgtcatcggtttttccatctcccgtagcaccatagtccatgatgttgtaaacccctgtttgaggtgaatggcatgctccgaataagaagatgctaagtagtgcaaaaagaatgtgtcttgttttcattatgcaaattttttacgtttttattctgcaacctcaattaaggaaggtggacaatcttcaggagtatttccccatgttttgttgggagtatttcccattgtaaataccatctcacctcctgctataatatctttgtgcgaaatatagttcttggtataagccttcccgtttaaggttactttttgtatgtagatattttcttcagaggcattctctgcttgaagaataaatgattttccattttccagatgtagtacagctttagggaatgaaggactggccaatacatagaaaggtgaacctggacaaactggataaaatcctaaagaagcaaaaatataccaggctgacatctgtcctgcatcgtcattacctgaaagtcctcctggagcattcaaatattcagtttccatgatatggcgtattgcctgttgcgttttccagggctctcctgcataattaaacatgaatgcgacttggtggcaaggctcatttccgtgccaatagcggtgttcgctgaacatcgaatccagtttcagagcaaatttttcttttcctcccatgtactccatcagtccgtatggatcatgtggcacataccatgtgtaatggcaaggagctccttctgtgataaatttggcaaactggaatgcgttttgttctttcaagaacgtgccgtcggtatgtcttccttgcgcatagcctgtttgcgggtcaatcacattacggtaattcagggcacgtacggacaacaacttgtaatcttcgttcttttgaagctgtttggctacttgggagaggacaaagtcatcgtaggcatattccaacgtacgtgacacctgttcttttgtgtggaaggcatcgggcacactatcctctaatgggatgtaaccatattttaggtacgattgcagtgcacggcgtcccattccattttgatagtcttttttattagcaggtgattcgaaagcattttttcgcatggcctcgtaagccttttctatgtcgaagttacgtacgccttttatgtaggcatctcctatagctgcaatgcaatgatcgcctatcatggctgccgtatagctgttccagcatgggaaaatagggatccatcctccttgttcaaacttatgaataagcgattgcatcatgtttcctccctgagtaggatataacaagttgataagtggatgcagggcacgataagtatcccacatactgtagtcatcgtagtatacttcattcgatgccagttggagaatcgaatctttttgggcgaaagctggatacctgccatctacgtcattgaatgtacgtggtaggaaagaagcccggtagaaagctccatagaatttctccttggcctcttggtctggtgtttccacttcaatagcagacagatgtttttcccaaatggcagtaagttctttctgtgtctggttgaaatcccaatgcggaatttcttgctgcatattcttttcagctccttctttatcggtaaatgaagaagccgctttgactaatatctgttcgtcgttttctacatgaaaacctatatatatgccgatgtttttttctttctcaattttaatttgtcccgggaatacactgtcttcacggaaggtcccgaattcgcaaggttccttttggtagtcaatgataaaatgaccgctgtatccggcaggttctccccagccttgataaatgcggtgtacggggttgtatccgtagatacgtttttgaagggtatcgatttcaatgtatccttctccttcatcgctgttaggattgacgatgagataggcttttcctgccttctggtaggtaaagcggaaaattgcagaccgtgagcggcctgtcagttcagcctgaagatgctcttcgggcaaagtaactgaatagtaggaaggggtagccgtttcctgttcatgtgcgaaacgtgtccctcttttttcgggtatgcagcgtaatgaatcgaataacgctgacaatgtcatagaaccgtaatcctgggtgcatcctcctgtaatccagtgcgaattgcggaagccttgaaacaaggagtcacggtaataataaggtgcgatgcatttttgctcggtatcctgtgtctgtggtgtccagaagttcatcccgttaggctccagtacggcaggcagcgtctgtccgtattcctccgtgtgctttccaaacatgccggcagtatgcgtgatgctggcggcagtgcccattcttgtgtcaatgtatggcagaagcctctcggtggtctgaccgtgagtgcatgaaataaccaatggggtgattgttcccaaaaacagtgatttgaataatatggcaaaatgcgtcttcatgaattttcaaactacgtgaaagcgtctttttgtttctgtaaaaataaggaatgaaatggtatattctttgtgggattaagactattaaacttgtatttggtaaatgttgtagtaaaattgtcttttgcaaacctaatgttggaatagctcaaattatcggtgaggtattttcctcaccgataatttatatagagtaattattctccgtatccaggattctgtttccagttggtgtttgcattgagtacgtcacgtgccaacggtagcagacgatattggggattagctgcatccggattataatcatacttaaatccccagtcacgctcaaagtcaccaaaacgaattaggtcgttacgacgccagtgttcgtcgaggaattcacgtccacgttcgtccaaaatttcctggagatccgggtcatgattcaattctggagcgtgtacatacgtgcgaatctggttgaatagactttgaggtgtgtcgcctaatgtagctgtaccgccacggacaatagcttcacatttcatcaagataatgtctgcataacggaagataggtacgtcgttgtcttgattacgactgtatacgttgtaatcgttgatatctgggaagaatttgatggaacgataaccttgtgtccatccggttaaagttgcgccacaattgaggtctgcatctggtgttcgtataataacattaccagaattgtctgtataactgccagttgccaaagaaatagatttgctgaaagtgactaaatctcctttataagtgtttcgtacgttagttggcatacctgttgcattatcatattggtatacatcgaaagactcttcatcaatattttcccctgtatttccggcaattactgtattacggtcatctcctggcaggcggaataattcaacaaattcaggggttagagtcatgttaccacctacagaattggtcatttcaatactatagaaaccattgtcgttctgtccacgacgccaggtacgaaaacgggcataagtcataccttgtgcggtgacagcatcatacggcatggcatagataaagtctttgatttgtgcaccgttggtgtacatgaacttttctttgtaaccgtcgtttaaattgaatagttgtgacttgatgacgcgatcacaggctgcgatacaatcattcaatttttcattaggcgtagtagaggaccaactggagctggtaacatcttgtgtatacacgttccaattgatatacagtttagccaatagtgcatcaaccatccagcatgttggtgtgccgtaggtcgattcagatacttcacttggacagttatcacgtacagcaagtagttctgtttcaatccatttagctacttctgcacgtggagaacgttcgatggctgaattgttgtctaccactttgtagtcaatgatgggggtatctccccagttgtccatcaaaaggaaggtgtagaaggcacgaacggcgcggagtggggcggtgaggcttgcctggtcttcaccttctcctaagtccatcagtaactggttgcaatttacaataccagcttgaatatcgttgtaaaccgccagctggctgttgctggcatccgcattgaccatgtggagagaaatgttggacatatcacgtccgtttaggtaatctccatcgaaactgactgcggtatattcgtcggagttgcaagatatgagttcgtcataacggcgtcccaaagcaccgcggaaggcgtaataagcattgtttatgcgcgcactcagtgcaatctcagaatcaggatattcagtgtactgagacttgatgtctacgtctaggtccgaacaaccgacagttgtaagtgccagtaaggcagcagaaataaaatatcttgttttcatatttttatgtctccatattttagattagaagtttacatttacacctaccatgaatgtacgtgtacgcggatactgggtattacgccagtccataccaggtgtcagacctcccagatagacttccggatctaatcccttgtagccggtaatggtaaatacgttattgcaggtggcatagatacgcaggttattcacccaattgcctaactttccgaaattgtatcccagtgttaatgtagccaggcggaaataagagccattttccagatagcggtcagaaggacgctgtgcattggaatcagagaatttttgttctgtggccacttcgcttaacacgtttttcccggctgctaccaacccaacgttattatagtagtttcgggttgcattgtagatctggtttcctgctacaccttggaagaaagcagttagtgtccagtttttccatgtgaaatcattgttccatccgtaagtcaatttaggttgtgcgctaccagttttgcggcggtcttcgtctgttggggcgtcggtcgttccaatcagttttccatcggcatcatagtcgttgaatacggatactccgctttcattgtagccagcccattcgtaagtatagaactgtccgataggagaaccttccataatgcgttgtacattttgacctgagaatccgccaacatcagggtcagacatatcaatgtaaggtacagaataggatgcgttggtcaatttctctaccacgtttttgttatgtgacaggttaagggttgtactccatgtgaagttatgggtttgcacaggcacagcattgatggtgatttcgatacccttgttgctgatatcacctacattggctgtcatggtaccataaggatagcggttggtagaaaccggataatcataaattaaatcactggtacgtttgtcgtagtattcgatggtaccgctcaggcggttgtgaaggaaaccgaagtcgataccgatgttgaacatactggtactttcccatttcaaatccggattagcatttcgggtagctcccagcattctataattggatgtgcttccatctggatttacgtaggtgaaccatcctgtagcaccatacaggggacgtgcgataaaagcgtcgaatcccaaagagtttccgcttacaccgtagccaactcttaatttcaagtcatcgaatacgtgttggtttttcatgaattgttcctctgtgatgcgccatgctgcagatacagatgggaaagttgcccagcgattgttttcaccgaaagcagaagaaccgtctcgacgaacagttgcttgcagtaagtatctgctcttatagctgtaattaatacgtccatagaaggagatcattctcagtgtagagaggttgttactgatgacgtcattaatatctatgttattggccatacccaagttgtggtaagttaaatcgtcattatagaaattatagactctcagtccgaaaccgtcgttgttgtcagcttgttcccatgagtaacccagcatgatacctactttatgtgcatctgcaaaagtatggttccaattcaggtaagtttccatctgcttgcggatgttttctgtagtgctacggtctgcctgtccgtgtttcgaaataactgaaggcaactgggtttgtgtggtattgtagatgttgtagatgtattgttggttttggtatgaaagattaagattccagtccagaccgtcgatgatatgcagggtggcttgcgctgtaccttgcaacaatttttcttttgtgtcataacggtcttcgttaatcattgacagcgggttatagttctgtgaaatattcaggttacgataccatgtaccatcttcattttttacaggaaccaaagggttgtagtagtacattgcatccaatacgctacgaccttggatgtcggttggtcctgtagaactattacggatgctggcatttagactgagggctaattctaaacggttatttagagctttggtttgtacgaaggtacgtgcattcaaacgatccatattagtgcctcttaccacaccttcacggtcttggaagttaagtgaagcactatagtttgttttttcattgccgccgttaatagatacgttatgattatggctgaaaccagtacgtaacacttcatcttgccaattggtgttagccggattatctacattgtagtaatcattcagctgggtaatgttatttgttttggcatagcttagtaactcatctgccgtcatcatatctaaggtctttaaggtacgatcccatgctacgtaaccgctgtagcttacactcgtacgtccatctttctttccttttttcgtagtgatgataatcacaccattggcagctttagaaccatagatggctgtagcagaagcatcgcgcaagacatcgatactttcgatgtcttctggagctaccagagagatacttactcccggtaccccgtctactacgtagtaaggttccatagcctcaccggtacgcagtgaagaagcaccacgcaaagagatggaagccgaaccgttcgggtcgctggtattggcgatagtcagcccaggaactttaccttgaagcatctgagccggagttgtaataacaccgacattcatatcttctgcttttacagtagtaatagaactggttacatctttacgttgcatgctaccataaccaataacaaccacctcgtctaaagtttctgtatcttctttcaaggttatattcattctattacctctcactacattttcttgtgaaagaaaaccgatataagagaatacaagtgttttacctttctctactcgaagagaaaaattaccatccatatcagtcacggttccgttggtagttcctttttcaactacgtttactccaatcaaaggatcaccggatgtactttttacatgtcctgtaactgtgagctgcgcaaatgcccatgagacattcatcagaaaaagagccataaacaaagcgaatggccttagtcttgcatttttcaattgtactttacacataaacttagatttttaaaaggttagtttttatcaaatcttgatatagatttttttacgatgaaggatgtagccagttaatcccattactgagcagaatagtaatgaatagataagagaggccagatattcatctggaacagcaatggtgattgtttgatagatagcgtcttttatttcccattgagagaatatgattgccacaacctcactgagcacgtaaaggaacaaaggattcattccgaaaaccaggaagaaggtccatcctttattgatgttctttacgtctattacatacataagtaatgccaataacagagagccccatccacatgtgactaaaacgaaggtggtagaccatactcgtttgttaatcggcatccaaatggaaagtacataaccgatgaccagcataattacagctgctgtaatgagcttgacaatccgtttgtttacagaaatcttttccagcaacaatctgccacacataaatccgatgagcgtgtgggctacggcagatagtgtgccggcaaggccttccggatcaatcggactctttttgtaaagatgggcttctccaaatacgcctctgtcgatgaccgcaagcagattggtgtcatcgcaggcatagccatttcctgtcagaagtaagatggaataagcaagtagtaatccaccgcaaatccatgggagatacttatgattgatataaatgaccataagcgatacgatgccgtaacataggccaattcgttgcaatacaccaggaatgcgcagagtgtcgatggggaagaagtctccattgcacacatatccaaaccagtcaatcgctaatccgattagaatgataaggaacgtacgccgaacaatctttttgaccacttccgaggtaggttcgaagttaaatttccgaagagaaatgtaggtggagataccgaccataaacagaaagaacgggaaaaccaggtcgcacggagtgagtccgttccatacagaatgacgcaacggtgcgtacgaaacggggcctccggcattgtttaccagaatcatgccgcataccgtgatgccgcgtaagatgtctaatgacagcaatcgtttcatggtgctttctgattaatggttattgcaattcttaattacttattcggaaacacttcattaaatacttcttttgctacgctgacacagtcaccttccggttgcgatgtgtacggattatgagcaagtgtccaaggttcttccatggcatagtagtccagttctaccatcggtttgccatcaagcacatcctggagtgtctgccagtaggctgcccagcgtttgtagtagaagtctttcagaagaccgttccattccttatgggcatagtcacgaagacctccgtcgttggcacatacgcggtttccccatgtggtaatctgtacgcgggcattccattcgtacaaatctttttcctctggagtagttccgaggttgcgggcctgttcaatccaacgtcctacgcggaattcacttctggtgcctaacagacggtcttgtgccagcaagatattcagaaactcttgtgagtgagctgcaaagttctttttgtcgaaactcttgaagtcggcaatggtctggttgtagacgatacgtcctctgtcggagagtgactgacggacgatgtctaccaggtcatattcaaagttgttgttgcctttgtatttgtcggctacttccagcatcaggcgggctgccgcttccgtgctggtcgggtcataatagttctgcatcttagaccagctggatgcctggaagttgttcagtccgggacggccgcagaaaatggattcgtgagggccttgctggttattgccaaacgggcagttgtagatgccgtcggcaagaatgctccatgcctgtgtaattttttcatcacgtacaccgtagcgtgcgaagagatagtcttttaaccattcttccttggtgaatttctccggacgccagggaagttcgcacatcagctcgaacatcaccggattgttttcgctgccttccatggtcagaccgatacctttcagatgggcggctaatggattgttcttggtaaggtagaaattgttcagcaactggtccatacgtccgtgcaaacccacgttgcctccgaagttctctatcatacagaacagccagtcgtgctgctcataacccttttcacgtttccagatagaaggaataccccacatcgggcggcattcgctgaacaggtccagaatcaggatatccccattgttcaggttcttgatcatctccgggcgcgggttttccgtccatccctgagtcacccatgtagccttcggattgacatccttcattgctttaagtacggcttttccggctgcatcaaaatctacacttcccgcatcctcaagttcatggaacgggtccatagagtaatagttggctttgccgaacagtttttccagttccttataatataaagaagcaatttcgttgaaacgtgagtcggtaggaagcaggaaagccggacgggtaaatccgttccacaatgcgggttcggttacgtttagtcccagtttcttattggcatcatgaggtaccataccggaatagcccggaaataccggttcgatgccgtattcgcgcatacgcttcagaatcttcttctgcagtgcttcctgctgtgtgtaccagctgtccggattgggaccgccccatccttccaggttgttcatggcccaccatgccaagaaagcaggtcctgcaatgaatttattgatttcttcttttgagtaaccaagtttttccagcatgtttttccatacacactcctgacctactactgccagtggcaagttgattccgtgcagtgccatccagtcgatttccttttcccagcgttcccagtcccagaaagccatggtataggaataagtgcaatagttgaaatcgtagcgtaaggagaggttggtttccttgcgtaccggagtagaaactttcggcaagctttccggcaacttggcagtcatgccgttccatgagagatgaatgcctgcgtaatatttcaaataccagttcaagccggtagcgatgtttacgtagttgttaccccgaatgactactttgtcacctttctggtcgagttcaaaaaaatcggattgtcctttttttacttgtatgatgaatttcttggaagctcccgaatcaattctttccagaagtccgtttacgggattactccataactgagcaaaagggaagcaaagacatgctaataggataagtagaaattgcttggttttcataataattatttttaagtatcacaaaaatcatattttatcgggaatttgaggaggaaaatagtgaagaaaagggagaaaatagtgcattgtggtttttacgcctttaaattgacctatgtcaagacactctccgcgctaaatgttgtaattttgtcacgttttttagagagttagtacgtggaacaggcaattcaacaaacaggtatccggaaaggcttgacgaagctcgtgattcctatctttatcgagaccttattgattatgatgttaggtgctgtcgacaccgttatgctgagtcagtattccgatgaaagtgtggcagcagtaggggtggtgaaccagattgtaatgtttgctttccttatttttgaggtaatcaatatcggtacttctgtgctgtgttcgcagtacctgggagcagggatgaggaacaagatggtgcaggtggtcggtgtgtctttgttgctgaacctggtcgtgggacttgtggtcagtgccattttgcactatggagcaactacattattgggatggatgggacttcgtccggaactgctgaaatatggtatcggttacatggagattgtaggtgcgtttgctttctttcaggctatctcgctgactatttctgcgtccttgcgtagtgccaacaaagccatttaccccatgctggttacggtgttggtcaatgtgatgaacattatcggaaactattccctgattttcggtaagttcggcctgcctgccatgggagcagaaggagcggccatatctacctccatagcccgtggggtgagcatgattgtcttgtttgtcattctcttcagagaacatattccgtctttcccgatggctctgttccgtcctttcccttggatagaactgaaaaacctgttgaaggtgggagtcccttctgccggagaaaatatgtcgtacagtttttcgcaggtggtcatcacctatttaatcaatatcttaggaaatgattcgctggccacacgaacctatacggtgaataccaccatgtttgtctatctctttgccatcgccatggcacaaggaggagccatcagcatcggccatttggtggggcagaagcggatacgtgcggcctacctgttgggaaagtacgtcatgcgtttgtccattttagtttcgctgggactttcgtgtatctgggccatattcggtcatacaatcttcagtatgctgacggacaacgagaatattatccggttgggagtgaccattctcattgtcgatgtcatcgtagagatagggcgtgccgtaaatatctatgccacgaatgccctccgctcggcaggtgacgtgaatttcccgttctatgtcggcctgattgtgcagtggacggtctctgtcggactcagctatctgttcggtattcatctgggttgggggctggtcggcatgtggtgtgccttcctgctcgacgagaatatccgtgcctttatctttgtgaaacggtggaacagcctgaaatgggcgaaaaaaggttttgtgaagtaaaagctacatgtccgattgaatcaggcagaaatagaacaggatgatgcagataatgtcgatggtaagtgcaatgaccgaccagcgcagaaactgcttgtttttcttgacggctccgtagatgattcctaaaatggcagacaggaatacaccggctacgatgccaaacaaaccctgtacggccactcccagcaatacaaggattcccatggtgataagaatgttgtttttcatgtcggttcaggttttgtaatgaaaaagggagcatgaagctccccgtatgatgtttttataagctggccttgatggcgtggataacggccgaggtaaatccgtcgtgctccagcgagttgatacccttgatggtgattcctcccggagttgtcactttctcgatttctgtggccggatgtgcattttcgttgtttaacaagagtttggctgccccttccagtgtttgtgccagcatggtctgtgcatcgtgtggcttgatacccagttctactcctgcctgcatggcagcttgtacgtatttcagtacgtaggcaatgccgcaggaagtcagcgaggtggcagctgcaaattgtttctcctcaatcagcatggaacgtcccatttcgttaaagagcgcagtcagggaagtaatctgttcttccgaagcgttgcgtgcagcaatcagtgtcatgctggctccttctgaaatggccgtgttgggaatgacgcggaacatcggcatttccgggtctacaaaatgtgccaggtcttcaaaagtcagtcctgccgccaccgataccagaatctgtggtcctcttaatctcagcggcttcaacacttcttccactttccacggcttgacggcaataatgataatgtctgcatcttctgccgcttctttattggaatgtgttacgtgaatggcaggaaattccactttcagtgcgtccagtttgccggcactggggttggataccgaaatttcttgtgcctgaatataatgtccgttggccagtccacgggcaatggcacctcccatgtttccggctccgatgattgctactttcatatctttcaattttgagttctttattcgcaaagttataattaaaaatgagagttgggctatataatggaatttattttggtggtatatggaaaaggcgagattgttttgtggaaatgcttcgggaataatggaatattttctttgtgagttttacgtttctcgtaaaggaaacgtatgtttctcagtgcggaaacgtaggttttaggttcgggaaacgtagggttttgcgtgggagaacgtagaacgtgtaaggggatgtggtaaataatgtaacgatgcttagaggatgatttggaaaaactattgatttctttgaaatttataatataaagaatagagcatgaacaatgttgatttgatgtacttgtacgtaaaaataaaaacggaatcttgattaagaagattccgtttttgtggataagtattttgtttttatttcgttacgtgatgcaagcgatttaggaattcatctgcttcgttcatgctcaggcagagcggcggaagcaaacggatgacgttggtaccgctgacaccggtaaatactttttcttcgaaaagtagtttctggcggagttccttgatgggttcctcaaattccattccaatcatcaagccgcgaccgcgtacttctttgattcctttgaagcctttcaattcttccaataggtgagtacctactttgcccgcattttcaaccagattttctgctttcatcacatctagtacagcgatagctgctgcacatgccagatgattgccaccgaaagtcgttcctaactggccatataccggagtgaatttcggactgatcagtacaccggccatcgggaatccgttgccaatgcctttagctacagtaatcatgtcagggcgtacgtcattgtactggtgagcaaagaatttaccgcttcttccgtaacccgactggatttcatccagaatcatgacagtattggtttcgtcacacgtctggcgaatggctttcatgaactcagtagtagggagctgaattcctcctacgccctggataccttcaatgatgactgcacatacatcgcctttagccagttcggctttcagcgcttctgtgtcgttcagcggcaggtatgtcacgtgtccgttgtcattgatcggagcaatgattttcggattgttggttacttctactgccagtgaagtacgtccgtggaaagcttttgcgaaagaaatcacacgtgtacgtccgttatagaaagatgccagtttcaatgcattttcgttggcttctgctccagagttgattaagaaaagctgatagtcatcataaccgctgatggctcccagacggtcggctacttcctgctgtaacttgttgattacagagttggaatagaatcccaatgtagctacttgtttgctgatggtttccacatagtgaggatgtgcgtgaccgatggagataacggcatgtcctccatagaggtcaaggtattcctgacctttgtcatcccatacgtggcagccttttccttttacgatgtttacatcgaacaaaggatatacgtcgaataacttcatataattaagaattaagaatgaataattaagagcagcaatcaaggagtcctgcctggttattcattttcattattcattattcattattcattaattagaatgcgctcggtttcagcttcagtcctactgtttcttccagattgaacatcaggttcatattgtgtacagcctgaccgctggctcctttcagcaggttgtcaatgcaagaaatgataagcagcttgtcgccatgcttttccagatgaatcaagcatttgttggtgttgactacctgcttcaggtcgatattcttgtccacgatgtgggtgaaagaatcttctgcatagtactcttcgtacatttttacaatctcttccagctctaccttggtctttactacgatagtggcaaaaataccacgggcaaagtcacctcggtaaggaatgaaatcgatttctgaatggaaactgttctgcagctgtttcagtgactgtttgatttctggcacatgctggtgtgagaacggtttgtagatgctgaggttgttgttacgccagctgaaatgactcgtagctcccggttttacacctgctccggtacttccggtaatggcgtttaccattacgtcgtcgttcaacagcaaatgcttggccaatggcagaagtccgagctgaatgcatgtagcaaagcatcccgggttagctacgtgcttgctatgacagatagtgcggcgattcagttctggcagaccatatacaaagtcatggtcgtccgatttgattcggtagtccatggacaggtcaatgattttcaagtcttccggtacattatgactctccatgaatttttttgtatcaccgtgagccgtacagaagaacaatacatcgatggtatcgagtggaagctcatctgtaaacactaaatcggtttctccatacaagccttcgtgtacatcagtaatcttgttgcccgcattgctggagctgttgataaatgcaatctctacatccggatgattaagcagcaggcgaatcagttcgcctgccgtatatcctgcgcctcctataattcctgcttttatcatacgtcggcctcgtctttatggttcgcataataggcacggagcggagtggacagcaccttgataaagcctttggcatcttctgcggtccatcctttctgcatttccccgtattcgccgaatttgttcttcacgaggtcatctttcgattccactcctaccgtagagaaaccgtaggggcggagttccagaatcgcagtgccgttgacgttacgctgtgattcggtcagcatggcttcgatgtcgcgcatgaccggttccaggtactggctttcgtgaaggaacatgccgtaccagttagctacctggtctttccagtattgctgccatttactcagggtatatttttccaggaagcggtgagcgccgataatcagcatcggagcagcagcttcgaatcctacacggcctttgataccgataatcgtatcacccacatgcatatcacgaccgataccgtaggctgcaccaatctcttctactttctggatggctttaatcttgtcatcgaacacttctccgtttacggcatacagctctcctttcttgaattccagtttcagctgttcgctgcctgttttcgttacttgcttcaggtaagcactttccggcaatccctgtgcggaatccagaatctcaccaccacagatagacgtgccccagatgcctacgttgtatgaatatttcagcttggtgaaatctgcctcaaaaccattttccttcaggtaattgatttcatattcacggctcaacgccatgtcacgtgtcagggtaatgatttccactcccggagccattactaggaaagtcatgtcaaaacgcacctggtcgttgccggcaccagtagaaccgtgagcaatggcatgagctccgatttcgttggcataacgggcgatggccaatgcctggaagatacgttcagaacttacagaaatagggtaagtaccgttacgcagtacgtttccgaataccatgtatttcaggctcttttcgtagtattcctgtgttacgtcaagagttacatatttcacagctcccagtttgtacgcattttcttcgttcttctttaactgttccgggctgaaaccaccggtattggcgcatgctgcatatacttcatatcctttttcctttgccagatacattacggtaaaggaagtgtccaatccgccgctgaaagcaacgacaacttttttcttttcttccatggtgcttatctttatatcgtgaagcttttcgcctgtatgagttcaggggaaaacctcgcttgagattatttttgtatttagaaattgtttattttatcgtctgtgtgcaaagccggatcgtaaagcatggctgtgcagatacaaaatttgcggtttttcgccatcaggatttcgtggttgatacatccttcacatcctttccagaatgagtcatcgtcggtcaactcgttgaaagtgacaggtacgtatcccagctctgtattcattttcatgaccgcagctcctgaagtcagactgaagattttggctttcggccatcgcagacgagccaaagtaaaagaggcatgcttgatacgcttagccagtccgcatcctctgtattttggatgaacaatcagtccggaagtagctacgtactgtttgtttccccatgattcgatgtaagtaaatccggcaaaatcatctccgcacaatgcgatgatggcttttccttctttcatcttggtagctacgtattcgtgtgtacgttcggcaatacccgtaccgcgaactttggctgcttctctaatcgtgtccaatattgtgtcaacgtaaacctcgtgtgaggcgtcggctaccattacatcaatttgtttagtaggttccattttttattcttatcagttagagttggtttatattcggtataatgttggcaagagcatgcttgacttctgtacgcgtacaattttcgcgaatcaccagcatgatggtgtcgtcgccggcaatggtaccgatgatttcatggaaattgtgcatgtcaatgtcgtatgccagactgctggcatatcccgggcgagtcttgatcacagcaatgttgtgggagaattcaatggtgatgaatccgttgtgacgcagcatttcgctggctttttgcggctctgtcatgcgtttgtacatggtattgttggggagtacatatacatagttcccgttcatgctggcagctttggctaccttcagttgcttcaagtcgcgcgacagggtggcttgtgtcaattggaatccttcttttgtcaactcctgcaagagttcgtcctgacttccaatctccttgctggagataatcattttgattgaatcaagtctgctattcttgttcttcattgtataattattcttttacggctgcaaaaatacggatatattttgaatatcatgcataaattcttacttttttgtgtgtttattctgaaaaatgcatgaatataatgaataaataaccattgtgaattttattttgtatttttgtgcacgttaattacagagacaaagaatcatgaagaccacatggctacaggcagaaaaggatccgatgggagctgccatatacgattacttcaagaatggaaaggctggaaagttaagagttttctcttcacagtttgaggaagatgaaattccagtgagcgaattattccgtacgtatgaatacatgcccttgctggaacaaaccgcactggatatggctcagggaaagattttagatgtaggagcaggcagcggctgtcattccttggctttaaagcaaatgggaaaagagtctgtggctattgatatttctcctctgtcggtagaagtcatgcaggcacgtggactggatgcccgtctggtcaatctgttcgacacgcatttcgttgaacgttttgataccattctgatgctgatgaacggttcgggaattatcggacgggtagagaatttcggtgatttctttcagcggatgaagctgttgttgaatcctggtggttgtatcttaatggattcaagcgatttgagatacctgtttgaggaggaagatggaagttttgtcgttgatttggcgggcgattattacggtcaactggatttccagatgcaatataaacaaataaaaggagaagcattcgactggttgtatgtggatttcaacaccctgagtctgtatgcttctcaatatggtttcaaagcagagctggtgaaggaaggcagtcattatgactatttggccaaacttaccttgtaactctttgtttctttttcagccataaataatacccgctgagtggaagtacgcctccgacaaaagctgccaggaaatagagtacctttgtatagatacctccccagtctccggtgtggaaggcatagaaccagcctttcagtttctgtgcgcgaggcacttctgcataggttgtggtttctgtaatctctccgttcttcggattgaatttcagggtatccgtacgacgcagttgctgtctctggataacttgtatctttttttcttctatacggagtgaagtgtagccggtgtattttgtctgtacttcctgagccgccctgtcccaagccgtataatcggtttgtttctttcctcctttcttggtacgtgcatcgttttccttttgagggagggaagttccgtgagtttgggcctgcttcgaagtgtttcctccaaaaagtccgtaagcaaacgaacgataccaaccaaacgaccaggtgagcccggtaagtgccatgaccagcaggaagagggtagaatagaagcccaacgtcacatgactgtcataccagaaacggcgccatcctttgcggaaggaaactttcagtcggttatttaacgctttatgggtgcgaggccaccagataacaaggccactgataagaatcacgaccatcagcagggtggagataccgactatcattttccctacagaggaagctcctttctgcggtggagggttcagcagccagcgatgcagtttccgcatggtttgaaaaaaagcgtttccttctatccatccgttcacttctcccgtgtacggattcacactcagactttttctgcctgcgtttttgaaagtcactgtagctgcctcatcggcttttcctgaatattgcagtgaggttagcttgagtgaatcggcggtctgctcctttatgcgtgcaatcagttgtgaaggtggaagaacggcagcgttcccttctggaacgcttaccttatatagatgggggttacacgcctgagtgatttccttttcgaataccagtgcagctcccgagaaacaaataatggaaagaataattcccactggaatagaaagccagaggtgtattttcccgaataattttctcatttctaaatgttattgttgggttaatgcaattttacctactgttgtaatttcatcggcttccacttccagtccttttacagcctctcctgtttgaggattgattttatagaatgtgggagtggctccttcttcggtagtcagtaccgggatgtaaaaatactgattttccagataaggggaatttccgaaagaagaaatcaggttcatgtcaggcaatcctgtaataggaatcagcttcttttcgctggctttgaatatcaccagttcatttttaggtgcattagttcctagtgtggctacttcttcaatgctgcatccgtaattattgagcaggaaataatcgccacctacgtgccagcagcggaacaacggatggccgctcgcaccactcatcgtttccagattgcaataatactcatcgaaggcagtacttccggcagggatgcgcacgacaccagaaggaagtgtaccttgtacctttgcctttaagttggcatcagccgcaggctgggtagccgtacgtccatatcctcctgaaaatacatacaagtttccgtcatcgtcgctccaaatggtctgatagtactgagaacgcatgcgtccgcaggcaaaaccaatcttgtctgttgtcgcaataaccggttcttcatcaaagttgctgccgctgtaaatggcaatataagcattatccggatattgggtagaaggaatctgtcctgcagtatacttaccgcttcctgagccgccggtaccggttgccacataatcctgactcaacaccttatcgggccaggtattcactccgtagtgactcatacccatgggaataatggaggtgtagagctttccgttggcttccacaaatccggccatggtaaccttttcaccgttccctaagaagttctcagccaaaatatcctgctggttggtactggtggtaccgtttttggcgttcaggtagttaaataaaaagccttgtgctgcattgcctttactgtcagtctgcttggtgtctccggtagatacggtaatcacattgtcaccccatgtgccgtaggtagtaaaacggttgaatgtataactgtattttttctgcggcacattgttggcatccagatagtaacatcctccggtgccttgtgatccgtcgttgtatttgattccgaaaaaataattctggtcgtaaaaaatccagtaagaaatctggtcctgaaattcctttccgttttcaatgactgagattttgccttcgtccagactttctgccgtaagcagataggaagtacctcctgcggtgaccggaatgacgtagtttcccttgaagttgttgtgattgctgaaggttgggtcattttcttcgttctgacaccccatgaacaggcctcccatgcagaaagcgcccagtcctaacataaaattctttttattcatatacttgtatttatatttttattggtttattactttccaaaatacacccggaactttccataaaatgcccgtccggctttttgcagactgaagttgtcatacagtttctcatcggtgaggttccggcattcaaatgaaatgttgtaacgtccgttcaggatgctgtatcccaaggagaggttatgcgatatctgctgcggtacccggattttagtagacgggtcaccaaagctttcccaatacaacgggaagtcatgctggtagaaacaatcccatccgaatgtgagggtattcccttttgcaaacaggttatgccagtagaagttcatatctacgtttgcatactggtaaggaatgttcgggatgcgctgtccgtacgtcagtgcattctgtccgctgcttgctgcccgtttcttttccttgtcacgggtgtcaaggttgttgaatgtacctcccatattgaaccagttgctgtaactgtatcgcagagatacattgaacccttttgtctctacccggccatgattggtgtaacttccgtagctggtgcctcctacggtcgacaagtcgcgcttgatgtagtcttgggtattacggtagatgattcctccttccacatacaatccgtgtttgcctaactgcttgttgtagctggcactcaggttcacgttgtcactacgttcaggtttcaagtcagctttccccgcttcaaggtcaccgtcaccaaacagttcctgtgtgctgggcatgcgcagagccttttcgtaagagagtttcaactgaatggctttccctaagaaataggttccggcggctccatatccaaaagagctgacactttgtgacaccctcgtatcacttcctacattgttgtcgcttagctgtaccgttccttcactgtaagaattgtagtgcttgccgaagaccgacagattccatttttcagaaggcatcaggcgataagataaccctgcaatgttttttcggcttttggtaggttcatcataatcttccagtacggaatttttctcaatcagactccgtcctgtacgacgaaaagtactgaatacattattaaatgtaaacgagtgcattttgcccagtcggtataccgcagtaagtgtggtattccagtttgtattgatttgttcactgaactggtgattctgttcgccggcagtcgatctggggatacggtcacccagccagttgtatttgtacattgctgtatctacgtttgtcgtcaggttgtggttgtaattggccgtaaccgtcacatccagtcctttggtgaaaagattctgcttgcgatattctaccgaaggaacgatggaatagccatgacgatgtttctcgccgaatacgatttcctggtacactccattctgtatttctttgtagaaatgcgagtaggccacattaaacatcagccggtcggcccagcttttcccggtaactccgatttttccgatgaccgcttcgttgtggaatgtatcattgaatcgttttacacgctgtatattactttcatcgctgacagacgtattgttttcgtggttgaactcttctacccagttgttgatatagtaattattatcagagtaattctgatatgcattgatttcgtatgtcagtccgtttctgaaactctgcccgaagtttatatacgatttatgcgtgttgaacgagccgtacgagtatgacgcatccagaaaccagttgcgcttctgtttgttggttacaatgttgataactccacccaaggcatcggtaccgaatcctacgggtaccacacctttatatacctcaatgcgctcggcaaagttgaccgggatgttattcaggtcgaaagctgttcctgccccttcctgtggcaccccgtcgataaatacttttacatgcttgccgctgaagccgtcgagcatcagctgcatgtccgatcccacacctccagattcgcgcagtttcattcccggaagtttctgtaacgcttcactcaagtttttggtagaattctgcagttcacgcgtatctacagctacggcattaaaggccgagcgcttgatgcgtccgactccgttggaaacgactacgacttcatccagctcggtgactgaaggcttcaagattacattttgcttgctacgtccgtctgccagaatttccacttctttttctaccgtctcaaatccgatggcagaaacggtcagtatatatttcccggcgggtgctttcagatgatacaagcctttttcgttggttgtacagccatattgcgtacctttcaggtacaccgtggcgaagtcaatgacactcttgtccgaagaaagaacttttccagatagtaacgaacggccttgtgcagaaagagataagacacaagcacccaataacataaaaagtacaccccatttcaaattttcgcttccccgcgaaaaagataaatttctcatttactgtaactcgtattttttgttcaggactaattttctgggtgcaaaattaaggcgattgtccgggtggggcaatcgccaaatatgggtaatttagactatgtataaatacctatttgtaggtattgtgtagtttgtcctataaaatgtaacgggttacggttagagaatttggactgttacaggatatggaagtgcttcaatgcctgcatgataccctcttcatccactgaggtggtgatataatcggctgcagcttgtatgtgaggagccgcgtttcccatggcaattcccatacctacatgtttcaacatcggaatatcgtttccgccatcgccgaaagccatggtatctttcaggtcaatgccgtaataagccaacatctggtcgataccgtgacttttactgtttccccgtgcaatgatgtcggcaaagagcggatgccagcgcatgggttcacaatgagtcagcaccttcccaaatatttcttcgtctttctcttcggggaaatatcccatgatttgcagaatttctttctctcttgcagtttctatgggacggatttccggaatgtcaatttgaatcagacgggcaatctctctgacagcctcatcctcatgtgtcaggaaccaggtattgtcgtgtacaaaaacaaacggcatttccggatggtcatgctggtactgaatgagtcgttcaatgtcttcttgcggcacacaacccttgtaaatgtcttcatgatttgctgtgaagcaatgtgctccgttcagcgtgacataaccgtcgaaatccaggtcacctacggcatccatcatcaatgtctttggacggccggtggcaatgaataccttaatacctttttctctcaaaagtcgcagggcttcgcgggtagactccggcacggtgtgagtctggaaagaaactaatgttccatcaatatcaaagaatatcgcttttaccatttttcgtgtattaaaagtccgtgcaaagatagcgaatttttaggagaattttttggacctatgtggaatctgccagatgataagtggactaatgaatatgatgatgaggcggaaactctagtaaaatctgtataaaactttccggactcttttacgtttcgcatggcggaaccgtaggttttccgacgcggaaacttacggttcccgatgcggaaacataggttttgggcaagggaaacatagaaaatgtaatttggaattcttgattggggtactgtgtttttttatctgcagggaagaggaaaggtttgttctgaaggagagtatttatataattgtgataaattgttttgtttctgtgtggtatttattacatttgccactgaatatgattaaataatgtgtatttgaaagattttttaggtgtttcctgtgcaaaagtgagagtgaatcatggaaaacaaaacgtatcagtataaaagaatcacggtaaagataggtagtaacgtgctgacccgccgtgacggcacactggatataacccgcatgtcagcattggtggaccaggtggccgagttgcataaagcaggagtggaaatcgtactggtgtcttccggagcggtagcttcaggaagaagcgagttgaaacccttgcggaaactggacagtgtggaccagcggcaacttttttcggcagtgggacaggctaagttgataaaccgttattatgaactgtttcgtgagcacggcattaccgtaggtcaggtactcacgactaaggagagtttttctacccgtcggcattacctgaaccagcgtaattgcatgaaggtgatgttggagaacggggtgattcctatcgtgaatgaaaatgatacgatttcggtgaccgagctgatgtttaccgacaacgatgaactatcgggtatgattgcttcgatgatggacatgcaggcattgattatccttagtaacattgacggcatttacaacggttcaccttcgcagccgggtacttctgtgatacgtacggtggagcgtggaaaggatttgtcggattacattcagacggaaaagtccggattcggacggggagggatgcttaccaaaagcaccattgcccgtaaggtggccgatgaaggtattgccgtgattatcgccaatggcaagaaagagaacatcctgtcggatttgttgtgtcatccggatacgacagtctgtacccgtttccttccagctatggagggagtgtcgagtatgaagaagtggattgcgcacagtgaaggctttgccaaaggggaacttcatctgaaccgtcaggcagtagaggccgtcaaaggagtgaaggctaccagcatccttccggtgggagtgacgcgggttgtgggagattttgagaaagatgacctcgtgcgcgtgatggacgagcaaggacggcagattggagtaggccgtgtatcagccgactcggcagaagcactttccatggtgggacagcacgggcagaaaccgctggtacattacgattatctgtatttggaataaaccgggatggcttactccatcggtacggtgcgttgttctgccacggattgtatggacagaggggtaaccgaagtccaaagagccaggtcgtgtatatcggccgggtaaggtatctcctgtttcatttcggcttctaatgctttgagcatgatgtagtccattccctcatggtgcgtgtcgatgcgcagtgcttcttctccccattgttgccaatagaggtgttcgtatttttgcaggtaagcggtatctgtctcccatgtttcgtgcggactttttccttccaggtaaatgcgtcgctgttctccctgccagattcctttggtgccttgtatttcgaagtccaggcttctggggcggggaagagtggtgtcgtgagtcaaagaaaccaaggttccggaagctgtctccagttgggtgacggttacgtctccctgcgtgacaggcacgtgaggatttcctcctaattcacggatacgctggtataggcctgcgggtttggaagaaaaggtggtcaggcgtacaaaacggtctttgcggggaatgccggcgatgaggcagagaggagccagtccgtgagtaggataaaggtcgccattttcctgctggtagaatttgcttcgccagatgctttctgtctttttccggttgcctagacggccatggtcatcgagcaagaggctgcgcaggtcgtggcggtatccgcctcgcatgtatacaatttctcccatctcgccgctttctaccagacggtacaatgctaacacctctctccggaaaaggacattttccatcggaaacacttttcttccggtgctttcggctgcctgtatcaggggcttgtattcgttcaggcacagtcctccttttatttccagtgctacgtggcaccctttttgaatgcagtatagggcatgtgtgacatgaagcagccacggagaggcaatgaaaactagttgcggtgcctgttccttgatcattcgccggtaatcttctcctccccggttgtagcagggcactccgtagtcttcttcccgcgcttcagggtcggcaatggctgtgacgtggtaaccggaaatatgacggatgagcgagagcagttgttttccgcggtagcccataccgataaaagcgatatgcagtatgtcgttattcatctttataatccgtaatccatattttcttttgctcgtgattgattctgtagcggattcccggactcagaaatttgagtgtggagaggaactcgtctagactttcgtcacgcagcgttgctttgtatttgagttttttggcggaagatgaaagaagaaactggtaaccgtagtgccggtaaagttctcctcgcttatcttctagtgtatggccgtcaaagataactgttttttcgcgccatgcatagacggaacctacaggaatttgtatcttttgaaaagtactgtccttgggctgacataaaaaactttctcctggagagagtatggtcttttgtgaagtaaagtcgggagatatttctacttttcccttgagcaaggtgacccggctctgttcttcgtttgtgtaagccgagacgtcgaagttggttcccagcactttaattttatagtgagcggtgtgtacgtagaagggttttccattttgagattttacgtcgaagatggcttcaccatgtaaggtgacgtttcgttcctttttccagttgccggtcgtataggaaagggttgaacaggcattcagccagacactggagccgtcgggcagttttactttagcctgttgtccggtttctgtttctacgatgactgggtaggattctgtctgaggcgtgaataatctttccgcttgccatccgataaccaggcaaaggagaatggaggccgcataaagccatgttgtccggatactccgtctgcgggtagtctgtgggctgatgcctgtccggtctgcgaattttttccattcattctgagtatcagcttccagtttttctttttcatattcttggtggagccaggcttctttcagagaaaaccatgcttgctggttttccttgctttcgcataaccattcataaagctgccgggtttcttcctctgtcagctggtggtgcatatatttttgaaagtcaattttcttcatcatgagatatcggattttaaaaggttagaaaagtaaaggaagaaagtgtgtcagcgaggctcttattaccttcagcccacggtacaaatggttttctaccgtccggatggataaattgagttcttcggctatttcgctgctcttcattccttgtcggtggttcatctgtacaaccagacggcattgctgaggcagttgctccagagccttctggaaattttcatcgagttccttaaaataaaggtcttccagcacgttcttttccttagtataatatgaaagttccagttcttttaatttggtgtctgtcaggttggagaaattgttttgtaaggcatttcttcttatttgtttcaggcattgagttttcagaatctgaaacaggtaggagcataaggtctccggactttcaatacggttccgatattcccagaaaagaatgaaactttcctgtgtcacgtcttttgcctcgtcttcgtctcctaatatctttttacagaagacataggctcttgggtggtattttttgtagaaccactcaaacgatgccagatttccttgtttgatatcagaataaattgcatgtgcttccataatgctgttctttacagagagtaaagtgagtaagttgtaataaggtcttgtttgtggaataaggaaaaaggatggttcaaagataatgttttatcttgtacagaccaatagtaaatgttttttttatgatggttctatttacggttctttccttgaaatatcaaataatgtataatctggccttctcctaccggtttcaggaaagcttgttttattccctcgaaaaaacgtctaggcgtttcatcctgcatgtcgaagcgtatttctctgcacgccgaagcattttatttcaactgttttattaataaatgtttaaaaaccggatgccgtatgagtaaatatttccagttctttttctttgttttaaacaaaggagtcctgggattgaggaaaaaaggaactttttattaactaaaatctaatttattatgaggaaatgcgtattacaagactggtggacaaagttttcctgtagaatttgggtggggctgatgtggctactgctgcctttcagtgtaactgcacaacacacatcgcttcagttaagcctgttaaatcgtccgttggcggaatttatccaggcggtggaaacacaaacagactttaagtttttctatgaagaaggacaagtggatactacatgtcctgtgacagtgaaacttcagaatggagatgtgaaggaggcacttcgtcaggctttggagtatacggctatctcttggagtatgtctgataaacgaattatgttggttcgcaagcaggcgccttctggcgagaatacacagaagagggagtttaaggggcaagtgctggatgaggctggaatgcctgtaatcggtgccaatgtaagtgtgaaaggcacatcggtgggaacgattactgacctggatggtaattattcgtttatggctcctgaaggaagtgtgctggtcgtgtcatatataggatatgccactcaggagttttcatgcacgaaaggggagtgtccggttgtgcgcctgaaagaggattcgaaggtgttggatgacgtggttgtcgtggggtatggtacggtaaagaaacgtgatttgactggatctgtttccagtgtgaaaggagaagatttggatcttggagggatggcttccgtgggacatgcgcttagcggaaaggcggcagggctgtacgtaaaacggaatagtgcacagccgggaggtggtctggatattctggttcgtggagccggatctgtcaatgcagggaatgatcctctttatattgtggatggttttccgattgccaagctggaccaggccaacggaggagacgctaagatggatcctggtacgcagggtatcctgaatttcctgaatccgaatgacgtggagtcaatagaggtgttgaaagatgccagcgctacgtctatctatggggcacgtgcagctaatggagttgttattatcaccacaaagcgcggaaagcaaggaaaggctaaggtagattattcttatagttattctttgcagaagtatgcggacaagtatgatttgttgaatttgaaagaatggatgattgaaaagaatcgtaccacctgggaaggatggttatgggataacaaggtcgctccatggggcacaaagacgctggaagaggcgcgtcagaatccgtataacggtatccaatatcaacagccttacactgatgaggaaatagctcaggcaggtctgggcacagactggctgggattaataacccgtaacggacagattcaagagcataatgtgagtattcaggggggaagtgaaaacacccagtatatgctttcctttaattattataatcataagggtattataaagaattccggtatgacccgttatacagccaaggccaatattgaccagaaatttctggatatcttcaaggtggggctgaacatggtgttaacccggatagataatgacaatacacaacttggagcaggagagtttgagaactccggcattatccggtcggccttacagatggggcctaatatcgaagcttatgatgaggaaaccggaacttatccgataaatcctctgataggtacgcagccgaatccttattccttactcaacaatatagatgaaggccggatagaccgtctgttgggcaatgtctttttggaggccagaccggtagaaggactgacactgcgtttaaatgcaggtattgaccatgccaatataggacgtaatacttatcagcctcgtactacgttaaacggagaaaagaatggaggagtggcgtatatttacaatactgcgaacaatcagtatctgctggaagctacggctacttatcagctgactttcaatcagattcacaatttgaatctgcttgcgggaacttcttatgagaagtttaactatgatgcatcagaactaggcaacaataactttgtgacagacgggttcgggtggaaaaatatcgcttctggagctggaacaaaaattgtcaaatcggcggcgactgagaacaagatgctttcttactttttccgcttgggatatgtcttgcatgaccgatatttgctgactgctactttgcgtgcggacggtgcgagcgtgtttgcccgtaacaataaatggggatatttcccttctgttgcgttggggtggaatgtgaatcaggagaagtttttgcgtaatgtggactggctttccaacttaaaactgcgtttgagttgggggcagactggtaatgcagatatcagtactaatgcgtttgccagctatcaggccgctaatggatgggtgggtgccgaccataatcctgttacggccgtaacaaaagctaaactggaaaatcctgatttaaagtgggaaaccacgacagaatggaactttggacttgactttggtttcctgaaagaccggattacaggttcggtggatgtgtatcagcgggttatttcggatttgctgaattataagccattgaattcttatcaagaggtcaaacaaatcatggccaatatcggaaagacacaaagcaggggaattgaagtgacgctgaatacgcgcaatatcgttacgaaagattttttctgggggacgacattgacttatgcaaagtatgaagaccgctggaaagaacgtacgccggactggaaaccgaatgtatatgaatcggtggatgatccgattcgtccgatttatgctcgccgggcagaccatatactgcaagttggagaagcacctcctgctgctcagccggatttgcttcctgggcagattgtcatcaaggatgtggatggttataagagagatagcaatggaaaccctatggtggatgaacagggacgttttgtacggacggggaaagcagacggaattattgatgaagccgatacgcaattaatcggttcggtagatcccggatggatgggaagtttgacaaatactttccgttataaaggatttgatttcagtttctcattgaacggaatgtttgaccgtataatggaagatccgacagaaatggattttgggttacttggcaataatatagcgacgagcggttataatgcgttgaaagtaatcaagaatcgttggacgccagagaatccttctgtgacccgtccaagttctttttacaatacgggacataattatacttatggagatttcttttatcaaaaggcgtggtttatccgcctgcagactataagtctagggtatactttgcctaagtcttggatagcgaaagccaaggtattgagcagtgtgcgtttgaatgtcagcgccaataacttgtttataattactccttataagggacttgatcccgaaacagactcgtatgctgctgcctatccgaacgcacgtacctttagttttggagttaatgtctcattttgaagtagaaaataatgacttaaaaaagaaaagagtatgaaaaagatgtactattcaattctatattttgtggctctgtgcagtatattttccatgagttcttgtgttgacttggatcccatggattcgtctgagattaatccttctatttatccacgtacggaagaggatatgcgttctttggtcaacgggtgttatcagtctgtaaggtcgagttggtttgacggactttttgcgacgaatgaacgtggagtaacgattgtaaatgatttgaccacagaaattctttcttgtaaggccggatggatgaaagacgtgtctgacttgaattttttccctacgactaatgatttaactcgcttttattacagtgatacggatgcgtatagtgatggttggctgaatgatatcagccagtgtacttcagtattaaaacagattgaagtgtgcgattttttgtcggatgaggtgaaaaaagagttgatggcagaagtgcgttgtgcccgtggcttgctttcttatactctttatgatatgtttggtccgttggtggtggctccgattgaactcctggagaatcccattgtagaacagccgttgtcccggctttcgcaagaggatatggtcaagtttatagaggatgatttgctgtatgcttccacaaacttacctgttccggcggatacggagtatggaagattctctcaagggctggcaaagatgctattgattcgtctttatttacatgaaactccgacaaaccgagagttctatcagaaggtagagaatctttgtcgggaaatgaaggattatggttattcactggcccaaagttatactggaatgtttgaagttggagggcagggaaaggcaaatccggaaataatttgggcgattccggtcgttttggaacaggtaagttggaatgactggcatatgtctatgttaccaacagattttgaagatcatggaatggaagcagggtatgaactggtcaatagtacgtgggcgttttatgatagttttgagccgagggatttacggaaaacctatttgattgcttcttacacgaacaataagggagaaactgtagatcgggaacatcccggaaatccggataagcatttagatgtagggcctattcctttgaaatatggatatgatataaatgtggtagggaatggaggtaagagtagcattgatcctatcatctatcgttatgcggatgtgtatctttcgttggctgaagcgctttgtcggaaaccttcatcgtctgttgctgaccggcaggaggcgcttggcttgataaatgacattcgtggaagagctggacttggagccttgtctgacgcagatattgcgacggatgagttattaatagatgtgatactaaaagagcggagccatgagttctggtgtgaaaatggacagtatcgtgcagatttgattcgtttgggtaagtttgtagaacatgcgagaaatatcaagggcactccttatgcggctgattataaatctgtatatccattgcctctttctgctattaatgatgggaaggggaaagtgatacagaatcctcaatattaatgaatttaaaaattgcagatatgaaaacattagtttatatgattcttcttgtcggaggattgtttttgtcaggttgtgacggaaaacacaagtcgcagacagtcaaagtggaatgcctttcagttgaaacgcctgagcgtgcgtccggacagcaagatgtagttggactggcttgtgatccgatagatactgtacgtattggattcataggtttaggagcaagagggacggaagccatacgacgatttacttatcagaaaggaattgaggtcatggctctatgcgatttacaccagtttcgcaccgattcttgcaatcgcatgctggtacgtgcaggaatgaaggaagcggatgtgtattatggagatgatgagcagtggaaaaaagtttgtgagcgtgaagatattgatttgatatatatagcgacagactgggtgaatcatgctccgataatgatttatgctatgcaacatggaaaacatgtggcttgtgaagtgcctgccgcgttgacgttggaggaaatctgggaggtggtcaatacggcagaactgactcgcaagcattgtatgatgctggaaaattgtgtgtatgatttttttgagattactactttaaatatggcccaacaaggtgtttttggagatatcactcatgtaaaaggggcgtacaatcattgtttgtctgatatttggccggattataatgctgattggaggatgcagtataatatgaagtataggggggatatatatccaactcatgggatggggccagcttgtcagttgcttaatattcatcggggggaccggatgaaatatctggtatctatggatagtgatccgttgtctctaccggtttggttgaaggtgcatggaagggataaagatgcggaaggatttcggaatggagaagtaacgttgaccctgatccgaacggagaaagggaaaacaatacagatagagcacaatgtggcatctcctcgtccttatagtcgtatgtatcagttgaccggaacaaaagggtttgcagaaaaatatccggtggaaggatatgcacttgacagtaagaatctgcccactgaagttgtaggaaaagaaacttttacggctcatgaatttatgactgaggaagtaaaacagcgtctgatgctttattataaggatgagatcgtgcgtaatatggaagagagggcgaaagaagtgggtggccatggaggtatggattttattatggattcccgtctaatctattgtttacatcatggacttccgttggatatggatgtatatgatttagcggaatggtgtgcgctgatacctttgactcagttgtctatagaaaatgggtttgttccagttgaagtacccgattttactcggggggcatggaataaggtaaagggatatcggcatgcattcgctgattgaatggaagtattataccaatatatttttatagtgaacgggtgtatacacctgttcactataatttaaattaaataggtttatgaatcgactgattttatttttaagttttgtattttgctttcttgttcaactgtattcacagccttataaagattcacgcttacctgtggatattcgtgtggatgatttattagggcgtatgacactagaagagaaaatagctcaaattaggcatattcattcatgggacatattcaatgaccaggaactggatgaagaaaaacttcaaaaattagcgggagacgttgcttgggggtttgtagaaggttttccacttactggcgagaattgccgtttgcatatgcgacgtatacaggaatatatggtaaataaaaccagattaggtattcctgtgtttaccatagcagaagctcttcatgggtcggtgcatgaaggttccactatttatcctcaaaatatagctttgggggcgacttttaatccttctctggcttatgataaggcatctaagatctcggaagatttacattatcaaggaatacgtcagattttggctccttgtgtggatgtggtgcgtgacttgaggtggggacgtgtagaagaaagttatggggaagatccttttttgaatgcaatgtttgcttgtcaggaggtgaaaggttatttggataatggaatatctccgatgttgaaacattttggtcctcatggcaatccttctggaggattgaatttagcttctgttaattgcggtattggtgaacttcatgatatttatttgcagccttttcggaaagtaattacttcattcccgatacaggctgtgatgtcatcttataatgcgtggaatagatttcctgtatcttcatctcactatttattgactgaggtcttgagagaacactgggggtttgagggatatgtctatgctgactggggagctatagatatgcttcatacttttcatcgtactgctgttaattctgcagaagcagcttttctggccgtatctgcaggccttgatgtggaggccgccagccaatgttatgcgtggttgccagagatattgcaaagaggcatggtgaagcaagcaataatagacaaggctgtaaggcgggtattgatggctaaatttaaaatgggcttgtttgaagatccttatggtgaacgatgggcacatgctcaaatgcactctgatgcgagtgtggcactttctcgtaaaattgcagacgagtccgtggtgttgttgaaaaatgaaggtggattactgcctttggatttgtctaaaatcagctctatagctgtaataggtcctaatgcccagagtgtacagtttggtgattatagttggagtaggtcgacagaagatggtataagtcctttggaaggaattctggcatacacgttaaatcgtggtattcaagtgaattatgctttggggtgtgatttgatgtcgaatgatgagagtggtattgtagaagctcaacaagtcgctcgtaaaagtgacgttgctgttgttttctgcggaagttctagtgcttctttagcacgtgattataaaggtgctaattgtggcgagggttttgatctttctgatttgagtttgactggggcacaagaaaaactgattcaggctgtgtatgccacaggaactcctgttatactcgttttagtaactggaaaaccttttgctatatcatgggaaaagctgcatttgccgtctattttggtgcaatggtatgctggtgaacaggaaggtgcttcgattgctgatatcctttttggaaaagtgaatccatctggaagactgcctgtctcttttccacaaagcgcaggacatttgcctgttttttataattatcttcctagtgataaaggtttttatcatcaaccaggcactctggataaaccaggaagagattatgtgttttcttcaccggatgtattgtgggcttttgggtatgggttgagctatacacagtttgaatattcttctccagagattcttttacggaacgattctgtctatgctttcgtgaccatcaaaaatgttggagaaagaacgggaatggacgttcctcaattatatgtaagggatgtagtcagttcgatagaaacgccagtacggcaattaaaggcatttcagaaaatagaattatcttcaaaggattctatgcgcatcgttttggcatttcctttggaagagttagctttgacggatgagaacggaaatagtcgtatcgagcctggtgaatttgaaattcagataggtaagtcatctgattacattttatttaaggaggtgattcaggtaggtgataggggaagatggaactggggggaattgtctcggcaagtgaaaaaagtacaatcttgtttggggaaaaacatgaaaatcggaggagtagtacgtgatatacaagctactccagttgagggagtggagattttatcagagagcaaggggaactttttgggatatacagatacaaatggacgatatttgattcatgctcagcagggagagtgcttgttgttccgtaaaaaaggttatttgcaggagaaagcgaaagtaaccgatgaggaatttatgccaatagttctacgaaatgacaagtttgataaatgaggaaaaattccgtattaacttcggtgatacggaatttttcatttgatattattgtttagcgtgtaaaaattgaatcagcaggttgcggggtagggaataggtatttccatgttcctgcacatatttcagcaggtagagtccttcctgacgaagtcgggctttaggcacgatgttttcggtgtcttctgccattttcagtaacatcatggcagctagttcggtcttctctatgccatctttttcctgactgtatttttccagtatggtttgtccgtccatttcttccagctgctggggagtgacctccagcacttgccgtgccgtactttcatattcctcccagtccgacttgctgatgtgcttccggcggagaatcaggttggctattgcggcaaatatttcctgaatcatgcgtatgatgtaatcctgtctgatcatggttttaaaattttcggttacaaagttcgaaatatttttcttggtttttcataatctttcgtaattttgagcgaataactaaaaaattgcactatggacgaacaaataagacaaataggagaacgtatccgcggactacgcgatgcgctggatttgagtgtagaggacatggccggacaatgtggattgccggtggaacaatataagcagattgagtcgggcgagtgtgacattgcggtcagtacgttgcagcaaatcggacggaagtgcaacgtgccgcttgacgtgctgatgttcggggaagaacctaagatgaatgcttatttcctgacacgctggggaaccggtatttcggtggagcgtacgaaggcatataaataccagtcgctggcttcagggttccgcaaccgcaaggccgatcctttcctggtaacggtagagcccaagccggaggatacacctatttattataatacgcactacggacaggaattcaacttggtgattgagggccggatgctgttgagcataaacggaaaagatctgattctggagcagggagacagtttgtatttcgattcttcactgcctcacggaatgaaggcgctcgacgggaaagcggtgaagttcctcgccatcgttatgtagtaattaattttgaaaagaaatatgctagaaagatttgttgaacaaactcactttacctcacaagaggatttcattgcgaattttaaagtgaaggtgccggaaaattttaatttcggttatgatgtggtagatgcctgggcggctgaacagcccgataaaaatgcgttgctgtggacaaacgacaaaggagaacatatacagtttacgtatgcggacttgaagaaatataccgatatgaccgcctcctatttccagagcttgggaataggtcatggagataaggtcatgctgattttgaaacgccggtatgaattttggttctctatcattgctctgcacaagttgggagcagtggtcattccggctacacacttgctgacaaagaaagatattgtatatcgttgtcaggctgccggtatcaagatgattgtggctgccggtgaaccggtcatcacagaacatattctggcagccatgcctgattctcctacggtagaacgcctggtgagtgtcggtccggaatatccggagggctttgaagatttccataagggtatggaagctgccgctccttttgtacgtccggaacatgtgaataccaacgaggatatttcactgatgtactttacttcgggaactaccggggagccgaagatggtggcacacgactttacttatccgctcggacatattgctaccggatgcttctggcataatctgcatgaaaacagtctgcacctgaccattgcagataccggatggggaaaggcagtgtggggaaagctgtacggacagatgattgccggtgccaatatctttgtatacgaccatgagaagtttactccggcagatattctgcaaaagattcatgattatcatattacttcactgtgtgcacctcctacgatttatcgtttcctgattcgggaagacttgtcgaaatatgatttgtcttcactggaatattgcacgacggcgggcgaggcgttgaactattctgtatatgagactttcaaacgcattacgggcatccgtctgatggaaggattcggacagacggaaacggcattgacgctggctactttcccgtggatggaaccgaaaccgggaagtatgggtgtgcctaatccgcagtatgacattgacttgttgaaaccagacggccgttcagcggaagatggagaacagggacagattgtggtacgtacggatagaggtaaaccattaggcttgttcaaggaatattatcgtgatgctgaacttacccgtgaggcttggcacgatggtatctattacacgggcgatgtggcatggcgtgatgaagacggttattactggttcgtaggacgtgccgacgatgtcatcaagagctccggttaccgtatcggcccgtttgaagtagaaagtgccttgatgacgcatccggcagtagtggaatgtgccattaccggtgtgcccgatgaaatccgcggtcaggtggtaaaggccactatcgtattggcaaaggactacaagcagaaggccggaccggaactgataaaggaattgcaggaccatgtgaaacgggtgacagctccttacaagtatccgcgtgtcattgagtttgtggatgaactgccgaaaaccatcagtggaaaaatccgccgtgtggaaatccgtcaaaaagacaacaattaaatgataaaaaatactatctttgcatcgatacttaaattttatatagaacggtgcaaatgaaaggaaaattttttattaatctagcatctgtattaagtttctttgcgatctctggtgagttgacagcacaggtcgtaaagcatgagcggttgctctcttttgaagaagctgtaccgcaggaactctccggcgcagggtcgactttatctcttagtgatgaacactataaagatggaagccgttccctgcgttggacgtataaaccgggggctgtcctttccctgaaaaaggatttgaagtttgaagccaaagatccgacgggaaaagatacgtatctgtcggcttttattgtatgggtgtataacgagaaggcagtagataagaaaataacctttcaattcttgaaggatggaaaggtatgtacatcttttcccttcggcataaacttcaccggatggcgcgcggcatgggtttgctatgaacgcgatatggaaggtacgccggaagaaggtatgaatgagttgaggatactggcaccggatgtagaaggggaactttttatcgatcatctgattccggccagcaaggtagacgcgcgtcagcaggctgccgatgtacaggtgccttttgtgcataaaggaacgaccaatcactggctggtgatttatccgcattcattgtggaaatcggatttacctttgaaaccggtttcagaaaaagagcttcaggatatgcacctgatggaaaagcgctaccgggatttgatttatacaccgggtaaattgtctcaaaaacagatagacaaaattcgccggaagtatgatgcctataagattgtatataaaaatggtaaggtgagcggactgcctatttttatggtacgtcagtcggaagcatacgagcgtatgattccccattggaacaaggatatgtttacgaaactgggtatggaaatgaaggcttatttcgacctgatgaaagccattgccgtggcatatcacaacgcgcaggacgcacaggtgaaacaggaaatgcgccagaaattcatggctatgtatgaccatatcaccgaccagggagtagcgtatggcagctgctggggaaacatacatcattatggatacagtgtacgcagtttgtatctttcttatttcctgatgaaggatgtgctgcgtgaagaaaatcgtctggcggaagcggaagctactatgcgctggtatgccattacgaatgaagtatatccaaagccgaccggaaacggtattgacatggattcctttaacacgcagacttccggacgcattgccagcattctgatgatggaggatacgccggaaaaacttcgttacttgcgtgccttctcacgctggattgactacggatgccgtccggctccgggattggcaggtgccttcaagagtgacggggctgctttccatcaccgtaacaactatcctgcgtatgcggttggaggtctggatggggcaactaacatgatttacctgatgagcggaacaacttttgcggtatctgaactggctcatcagactgtaaaagatgtgttgctgaccatgcgtttctattgtaaccagcaacagttcccgctgtcaatgtcgggacgtcaccccaatggaaaaggaaagctgattccggtacagtatgccatgatggctatctctggaactcctgacggaaaagaaaagtatgatgccgatatggctgctgcttacctgcgtctggtaagagaaccggcaaaaccgggtgccaatgaaccggattatttaccgcaggcaccggccggactggaacgcaagctggagaagaaactgctgaaggcaggctttactcctgaaaaagacccgcagggaaatttagcgttgggatatggctgtgtgtctgtacagcgacggaacaactgggcggcagtggtacgtggtcattcacgttacttatgggatgccgagcattacttggatgccaatttctatggacgatacttgggttatggcagcatgcaggtgctgactgctcagccgggagaaagagtaacctttacaacgagtggctggcaggaaaacggattcgactggaaccgaattccgggtgctacttccattcatctgccttttgaccagttgcgtgcgaaagtgctgaatgtggatgctttttccggaatggaagaaatgctgtattctgatgaggcatttgccggagggctttctcaagaacgtgagaatggaaactttggtatgaagttgcacgaacatgataagtacaacggttcgcaccgtgcgcggatttcgtatcatttctttggaaataccatcgtagctcttggctctgacattgagaatgtcaatcaggactatcctacagaaactactgtattccagctggctgccattacgccggaagaaaaagcatattgggacaactggaaggataacggacatacgtatctggctcctaatggagtggggtattatgtaccgggaaatgtacagtttgaaaagaacttccctcaggtaacagttggtgaacgtagtgtaaaaccgacttccggcgattgggtatctttggtgttcaatcacggaaaagcacctcagggggcttcgtatgaatatgcggtgttgccgcagactgatgaacaaggtttgacacagtttgccaaacaaccgacttatcaggtgttgcagagagaccggaatgcgcatatcgtgacttccagtgcagaacatttgacttcatacgtgctttttgaaactccacagaaggctttgccaggtgatttcattgagaaggcggatacttcttgtctggctatggtaaagcaggtggacaagaaaaaactggtgctgaccgtggcacaaccggatatggctttctatcgcggtccgagtgatgaggcctttgatgaaaatggcaaacgcattgaacgtagtatttattctcgcccgtggattgatgacgagagtaaggagattccggtaaccatcactttgaaagggaaatggaatgtggcatctcatcctgccgtgaaggtgctggaatcggacaagaagcacaccatattgcagtttacttgccgtgaaggaaagagctatgatgtgcagctttccaaataggatactgtaaggtatacatacacaaaaagccggagtgacaagttgaacgctccggctttttgtgtatttgtatgatggatagttagttgcgtgaatcggctccccacatcattttctcacgtaaggtattgaagaaagagtggtggcagcgcttgacgatgcggatgaagtattctcccctccgaatagtgagtcgggtaccttcacggaaggtctcactccggccatcgatggcaatcagaaaattatgactgcggctttctacttccagtgtgacttcccactcgtcgcgaatgacaatggggcgtacgtttaaactgtgtggagctacgggagtcaggctgatggtaccgctctgaggtactaaaatcggaccgcctacactgagggagtagcctgtagagccggtaggggtggccacaatcagcccgtctgcctgatacacattcaacagttccccgttgatataggcacgaatggtaatcatggaagaactgtctcgtttcagaatggcgatttcattcagtccgtaaggataacctttcagtacctggccgttgcaggtaagtttcagtacccgtcgtggttctgccagatacattccctgataaatctcgtcgaaggtttcttccatctggtcgggtgaaatgtcagccaagaagcccaatcgtccggtattgatgcctaatatggggatttccttgttgccaaccaggctggctgttttcagaaacgtaccgtctcctcctacactgagtgccatgtcggcggtaaagtcatgaccgttgaaaatctctaaattggttaaatctgcgtttgtgtgcaggcgaaggaactcataaaactcacgatggatacaaatgtgtgcctccttgcgccggaggatttccagcagatgggttacatgagccgatttatgctcctgatacgtatttccaaagagggcgaatttcatcttccgctgcatagaatgtgtcttttttatcaatctttttaagaataaacatgtcaagtttctcgtaaaacctgctaactttgcacgttgttgatgcaaagatagtgaaaggcgagagcagagacaaacgaaaaacaaagtttttcgataggactatgccgagccgtttcctgtcttcttaaaagataacgaaattcatgaaatatgactaaattaagtgtgaatataaataaggtggctacgcttcgtaatgcacgaggtggaaacaaccctgatgtagagaaagtagcgctggactgcgagctgttcggggcggaaggtatcacggttcacccacgtccggatgaacgtcatatccggtatgcggatgtatatgccttgcgcccggtgttgaaaactgaattcaatatcgaaggatatccttcgaaagagtttatcgacctggtactgagagtaaaacctacacaggtgactttggtgccggatgctcctgaccagattacttcgaattgtggatgggacaccaaaacgcatcaggctttcctgacagaattgatggatacgttcggtgaagcaggcatacgtacctctatttttgtaggtacagacctggaactgattgagtatgcggccaagacaggagccgaccgtgtggaattgtacacggaaccttatgcctcactctatcccaagaatccggaagcagccgtggctccttttatagaagcggctgagagagtacataaactgggaatgggattgaatgccggacacgatttgagtctggtgaacttgaagtatttccatgataatatcccttggctggatgaagtttctattggtcacgcactgatttgtgatgcactttatttaggattaaagaaaaccattgaagaatataaaaattgccttcgttaaattatgatgacattaactttactggctgccgcacaagctgtagccgatacaatggccggagcaaatccggtgttgactccggttgcttcgggggaaccgcagatgaatctttgggatatggcctgcaaaggaggctggattatgattgtactggctttgatgtcggtaattgctttttatattttctttgaacgcgcggtggctatccgcaaggctggaaaggatgatcctttgtttatggaccgtatccgtgattatatcaaatcgggagaaatcaaatcggctatcaattattgccgcattacgaacactccttctgcacgtatgattgaaaaaggaatcacacgtatgggacgtccggttgccgatgtgcaggctgccattgaaaataccggaaacatcgaagtggccaagctggaaaatggtttgtccattatggctaccatttcaagtggggcaccgatgttgggattcttgggtacggtaaccggtatggtacgtgccttttggaatatggctaacgctggaaacaacattgatattacccttttgtcaagtggtatttatgaggccatgattactacggtgggtggactggtagtaggtattgctacgatgtttgcctataatcatctggtgtatcgtgtagataaggtagtaagtcagatggaagcacgtacgctggctttcatggacttgctgaatgaaccgactgaaaaataatcgcgtatggctttaaagagaagacagaaaatatcacccagcttcagcatgtcgtctatgaccgacttgattttcctgctgctgatattttttatgattacttctaccatggtatcgccgaatgccatcaaggtgcttctgccgcaaggttcggagcagacttcggctaaacctatggcacgggtgattatagataaggacctgaattattacggggctttcggtaacgaagatgaaatgccgctggccattgatgaagtgacggcttttcttcaggaatgtgctcggaaagaaccggaaatgtatgtggcattgtatgccgatgaatcgattccttatcgggaaatcgtgcgggtgctgaatattgcgaacgagaatcattttaaaatggtcctggcgactcgccgtccggataaaaactaaaacagagtaacgttgaaaaaaaataaggtaatcggaattgtatgtacggtggctttgcacgtgctggtgctgctgttgctgtttcttctgaagctgaccgttccggcagaacaggaggaaggcggtgtgcccgtcatgttaggcaatacggaactggctgcaggtgatgccgacccttatacgatgaccgaggtggatgtcatgccgtcggaagctccttcttctgcaccggaagctgcagcagagccagaggtggaacagcccatgattacgcagcaggatgaaccttctttgcaggtgaagaaagaaaagcctaaaacagagacgaagaaggaacaacctaaaaagacaccggtaaagactgaaacgcagaaggtgaataagccgaaggagaaaacagaggctgaaaaacgggcagaagcagaaaaagcggctgctcaggctgcggccaatgccattgctggggcatttggaaaaggttctcagatggggagcaaaggaaatgccgccggagccggactgcagggtagtcctacaggaaattcttctactggaaaaacgagtggtgtaggtggttatggcacattcgacctgaacgggcgaactttgggaggtggaaagcttcctgtacccgtctacaatgtgcaggatgaaggacgtgtggttgtaaccattgtggtgaatccagccggacaggtcatcagtaccagcattaacaaacggacgaacacagtgaatccggcattgcgaagagcggcggaagaggcagctcgaaaagcacgctttaatgcggtggatggagtgaataatcagagcggtaccattacgtactactttaagttgaaataaaacttttaattctaaataatagatttatgaaagcagtttgtatctttttggctgaaggtttcgaggaaatggaagccatgtttccgttggatattatgcgcagaggcggattgaacgtaaaaacggtgtctgtcactggaaacaagacggtcatcagttctcatcaggtacccattgtggctgatttgttgttcgaagaactgaaggaggaagatgtagaaatgattgttcttcctggtggactgccgggtgctactaacttggatgcacatgccggactggacaaactgattatgagctttgcggctgccggaaaaccgttggctgccatttgtgccgctccgatggtatatggcaagcgcggtttgctgaaaggcaagaaagctacctgctatccgggcttcgacaagttcctggaaggagctgaatatacaggaaatatggtggaagtagtcgacaacttcattttgggtaaaggtccgggtgccgcacctgcctttggctttactatcctggagaaatttgcaggagcagaaaaagcactcgaagtgaaaaaaggaatgttgctggcttaatgaagaaatatgtgatagtggtagcgggaggaaaaggcctgcgtatggggggagagattcccaaacaattcattccggtaaaaggaaagccggtattgatgcgtacgctggaaacttttcatgcctgtgacccgaacattgaattgattgtggtgcttccggtggaacagcgttcctactgggagcacctttgtgctgaatacggctttacgttgcctcaccgtattgcggcaggtggagaaacgcgtttccattccgtaaagaacggattggcactggtggaagaagacggtgtggtcggtgtgcacgacggggtacgtcctttcgtctctgccgaagtcattgcgaattgttatgcgcaggcagccactttgcaggctgtggttccggtaacagatgtagtggaaacagtccgtcatttgttgcccgaaggaggaagtgagactgtatcacgcaatgactacaagctggtgcagactcctcaagtcttcactgtggagttgttgaaacgggcctatgcccaggactacaagcccttctttaccgacgatgcttcggtggtggaagcattgggacagcctgtacatccggtatccggcaaccgggagaacatcaaactcaccacgccttttgacttgaaagtagcagaatctcttatcgatgactaatgtttgacctatccacacgcgatgtgaaatatttgccaggagtagggccgcagcgggcggccatactgaataaggaattaaatatctattccttacgcgacctgttgtattatttcccatacaagtatgtggaccgcagtcgtctgtattacatccatgagatagacggcaacatgccttacatacagttgcgcggacggattctgagttttgaaatgttcggagaaggtcgtcagcgccggctggtgggacatttttccgacggtacgggagtggtggacttagtgtggtttcaaggattgaaatatatcactggaaagtacaaagccaacgaagaatacattgtgttcggcaagcccacggttttcaacggacgtatcaacgtggcgcatcccgatattgacccgacacaagaactgaccctttctaccatggggcttcagccttattacaatactacggaaaagatgaagcgtaccagcctgaattctcatgcgctggaaaagctgatgaaaaatctttttcaggccttgcagaaagaaagctttgaggaaacgctaagtccctctttaatcgcagcacatcagctgatgcccctgaccgatgcgttgtataatattcattttccgcagaatccggaacttcttcgtaaggcacagtatcgcttgaaatttgaggaactgttttacgtacagctcaatattctccgttataccaaagaacgtcgcaataaattccgtggactggtatttgaacgggtggatgaaattttcaataccttctatgcgcatcacctgcctttccagttgacgggggcacagaaacgtgtaatcaaggaaatgcgtcgcgacatgggcagtggacgacagatgaaccgtttgttgcaaggcgatgtgggtagtggaaaaacattagtagccctgatgactatgctgatagccttggataacggattccaagcctgcatgatggctccgacggaaattcttgccacacagcattatgaaaccatccgtcgctttctgaatgggatgtctgtacgggtggagttgttgaccggcaacgtgaaaggaaagcgtcgtgaaacgattcttcgcgacttattaacaggggatgtgcatatcttgattggtacgcatgctgtgattgaagataccgtcaacttctcttctttgggactggtggtgattgacgaacaacatcgttttggagtagcccagcgagccaagttgtgggctaagaatacccgtcctcctcatgtactggttatgacggccactccgattccacgtacgctggccatgaccttgtatggcgacctggatgtgtcggtcattgatgaattgcctcctggccgaaagcctatccagaccattcatcagtttgacaaccgccggaaaagcatgtacgagttcatgcggaaacagattcaggaaggccgtcaggtctacatcgtgtatccgttgatacaggagagcgaaaagatggacatcaagaacctggaagagggttacatgcacgtctgcgaggagtttcccgagtacaaggtcagcaaggtgcacggtaagatgaaaccggccgagaaagaagaagaaatgcagcgtttcttggccaacgaaacccagattatggtggccactaccgtgatagaagtcggcgtgaatgtacccaatgcctcggtgatggctattgagaatgccgaacgcttcggactttcccagctccaccagttgcgtggacgagtaggtcgtggtgccgaccagtcctattgcattttagtgaccggatacaagttgacggaagaaacccgcaagcgcattgaaatcatggtacagaccaatgacggttttgaaattgccgaagccgacctgaaactacgtggtcccggcgatttggaaggtacccagcagagcggggtcgccttcgatttgaaaattgctgacatcgccaaagacggccagttgttgcagtatgtccgtgaaatagctgaacgcctgctggatgacgaccctgaaggcatgaaaccggaaaatcaaattatctggcaacagttgaaggaacttcgtaagaaaaatgtaaactggtctgtaatatcctgactattaagtttatatagtccgattggatgtaatcggaaaaacgcaagtacgtttggaggtaaacgcctttacgtttgtatctaaacgtacttgcgtttcaggtaaaatgtacttacgttccgtttgaaatgtacttgcgtttggggaagaatataaaagctttgcgtgtatctgttgaaaacgtgtgatagtatggtcgcaaaaaattacatgtattccgtaaaagattccattttttcgtgtatgttgaggcggtacttttgaattgaagatattatgtctcatttttttactttaactaggaaaaacaatgaatcgatttacgggaacaattatatgtatgatgacgggaatgctggccatggcacagcaagtgtatgaactggatatgcctgtcaaggaaaagacaatttatagtgggcacctgaagttgggaggaagtaatccttccggtgagcgtattgaggtaaacagctattatatgtcggtagggggaaagccggttattccagtaatgggagagttccactatagccgttatccggaatgccagtgggaagaagaaattctgaaaatgaaggcaggaggagtaacggtgattcctacgtatgtattctggagtattcatgaagaaaaggaaggcgtatttaattgggaagggaaccgaaatcttcgtaagtttttgtcattgtgtcagaaacataatgtgtggacggtggtacgaattggtcctttctgtcatggggaaatacgaaacggaggacttcccgactggttgtttgccaagcccttggaaattcgttcgaacgatgcgaactacctgaagtatgtgaaacggctttatgaagagattggccgacagttggaaggattgtattataaagacggtggaacgattatcggcacgcagatagaaaatgaacaccagcattcggcggctccttggggaattacatatccgggcgaaccgaaggacatgacgtcggccacttatgatgccaatattacgatgataggagtgagtgtacaggacaagaaaatcacgacggctgatttaggtaacctgcacatgaaaacgctgaaaaagatggccgaagaggccggaattcagacacctttgtacacagctaccggatggggtaatgcagctgtaatcggagaggaggccattcctgtgacggctgcctatacatatcctttctgggccaaaccgggtatgtctcctttttgcatgttcaaggatattcagaagaatcccgattatgcaccggtgcgttatgacaccgagaaatatccttccttctgtgcagaaatgggagtcggcattcagatgatttatacccgccgccctattgtcacggctaaggccgcagaggcgttgatggtgcgtacgctggggagcggtgccaatggcatcgggtattatatgtatcatggaggttctactccgaaaatgggacctacggcctttttcagcgatgaaccgatgggaatgcccaagatatcgtatgattttcaggctcccttgggagaatttggtttggaacatggttcttatcgtgcgttgcgcctgttgcatctgttcctgaacgatttctccagccagctggcaccgatggaaacggtgcttccgaagggatatgaacggatgactccggataaccgggaaacgttgcgatatgcggcgcgggtaagaggaaaatcgggtttcgtgtttatggtgaactttcaagaccacgatacggctcgggtagaccagaaagatttgtgcttacggctgaagtttgcggatgaaacacttcgtattccttcgcaaggtacgtttactctgccgaaagatgagagcctgattctgccgtttaattttcagatggaagatgccttgttgaagtatgccaccgctcagttattgctgaaactggatgacagggggacagaccattactttttctttgtgccggaaggtattcaaccggaatttgtgtttgacaagactacggtagccggaaaatattgttatactccggaagcaggcttaaaaagtacgtttacggtgaagacatccggtggaaaacggtttaaagtaaccacgctgacccgcgaacaggctttgaatgcttgtaaaatcaacggtaagttgttgataacttcttccatggtgctgccggaagcaggaagagtacggttgctgaatatgggagacccggtgttccgttatgtagaatattcttcggcaaaaggctttaaggaacagatgaaagaagttccttccgtgcagcccgaatataccttccgtaaggttggaagccgtcggttggcagttcgtttttccggaaaggaatatcctcaggtaaatgactatttcttgcggctggattatacaggcgacgtggccatggctttcttgaagggtgagctggtgttggatcacttttattatggagccccttggcagattagtctgaaacgtttccagcaagaactgactgatgaggaactgagtttttacattcgtccgttgcggaaaaatgcacctttcctgtctgatttgccgggagaagctgttcctgatttttccaaaggttcggtagttcgggttgattcagtgcaggttgttccgcaatatgtgactactttgtaatggtaagctggtaggagaaaatctagaaaattgctattgcgcttcattaggggatgcttcttttttctttctgtattccgtaggagtcattttatattcttccttgaaataatgtgtaaagatttttggagtattaaatcccactttgtaagctacttctgcgactgtcatctgggttttctccagtagtttcagacttttcttaagccgtatgatgcgtatgaatttgcttggagaacttcctgttatagacatgagtttattgtataagttacttctgctcataccaataatgctacttaattcttctaccgagaattgaggattttcgatgtgttcttctacagtcttgatggttttttgaatgaaagattcgtccaatgagcttgaggtgatgtcactcactggtatatctgcaatagaaaactttctatggcattcttgtttccatttaagtattttattgatgcgaagttttaaaatattcaggttgaagggtttggcaatataatcgtctgctccttcagttagtcctttctttatatgttcaatatcattcttagctgtcagcatgataactggtatatgtgaaattttgatgtcactttttatggcatggcatagttcaatcccatccatgttaggcatcataatatccgtaatgaccatatcaatatgctctttcttgagaatagataatgcatgtagtccgtcaactgcagaaaaaatatgatattccttttttagagaatcggataaaaataagcgtaagtcttggttgtcttctacaatgagtagggtgttttgatccagattttcgtttttctcctctgattctaaagataccatttcttcttcggtcggttggatatgaaattctgtttctacaatttgctccatgggagtaataggaatataaaatataaatttagctcctgttggcaggttgtcttctatatgtatgtctccatgatgtaaagagagaagctcttttacaatatgcagtcctatgccacttccatacgatgatttttcatcagctatttgataaaaagcatcaaagaccttgcacttctcattatcttctatcccttttccgttgtcggctacactagtaaatactttttcgtcttcgatccatattttaactgtaattttaccaggagtacctgcatattttatagcattagataaaaggttcataagaaccttatgtattttgtctttatcaaatgccatagataaagtgtcaatctctttttcgaaggttaaagtaatctgataagtggttgcatatacggaaaaatgtttgataatatcgtctataaactcaatgtagtctcctttctctggatgcagtttcatttcttgtatttcaattttacggaaatccaatatttggttcactaaattcagaagggacaaagcatttttatgaataatattcaagtttgatgtaatatcttcgttgtgatgagttttgagcacttcttctagtggagctataattaaagatagtggggtacggaagtcatggcttagatgagtgaaaaagtttagtttcatttcatctatttcatgttgttttttagcttcaaactccatttccttatagtgcattcttcgtttgtgcttttgttcctttcgataccatacataggagaatagtgtgataaccaagagtaaatataaaattttggcataaatacttaaccatataggaggttcaatattgatgagaagtgtggagggattactccatagtcctccagagttggtagctcgaacttctagctcatatattcctggagccatattgttaaaagcaatatagttgctttcgagtgaaatccattgattgttcgttccactcaatcggtaggagaaccgaatatcatgagtacgtacgtactccatggttgagaaacttaatttaaaagtattttgattgtacttgagcgttattttgtctgtaagttcaatattctggcttaatattttgtgatgattatataaggaatctacattaatagttgtgtccagaacttttaattctgtaaagatgactttggatatgtttttgttgtattttatattaggattaatatcgtaatatcctccatttcctcctactatgatatgaccgttttgtgacttatatatggagttatgtacgaaatcagaggtttgtaacccgtcgtttttggcgtatgggaggcaatgaaatgtatagccatgtccatgttgatctacttgtatctctattttagtaactccatctgtagttactacccaaatattttggttgttatcttcggtgatgcctcgtacaaaatttccttccagtctgtggctcttattcaaatagtaaatcgtatcaagacgtgtgtcgaatatagtaagcccttctcttcctcccatccacaaaagatttcggctgtctatgtagacgttattctgtattgtatcttggatgaattgtgagttcttatagttgtggcgtatattttttatttcatgattctctgtatttatgacgtgaacaccattacaggttgccatatatatggagttctttttgtcaaaaaatacgttcatgatatgcggatcgacaagactggaattttgtggagtaaatgtgtgaaaatatcctgttttaggattaaatatatgcaggccacattttaagttccctaaatagagatttcctttattatcttcagtgatgctccatatactgttgttgacgggatttcttggaaatttatcagaaaaaggttgttgatggaaacaattattctgataatagccgaatccatccagataggtgccaatccatattctgttttgggcatctacgtgcatgcaaataatcttattgctaaatgaattattttgctctttcttaaaagtggtaatattcccattaggatctactttatagattccatctccgtctgtaccaatccataaattatgctcatgatcttccacttgacatgaagtatcgtaagtggaagggagcatggttttagagaaagagaagaagtgtgggttgtagtaggatattccgtttcgcattgtacctacccacatagtgttttcatcatcatagtaaaagcaccatactttgttgcttcctaatgagtaaggggacaggttttgtgaaatatgggtatgttgttgtttctctttatcataaatactgataccgtcatattctaatccaatccatattttatggaagttatcttcacaaatactgataaccttattttttagaaggagggtattttttcctattgtacttaacttccatgtgttatttgtattttgagagaacagccaaagtccttctgtgttggaactatatacccaaatgtcgaggttgtcgtctacataaaatttatagctcaagaatttttctgcacctaatgcttcgtttagtggaataatggcatttgtatgcttatgtaatagatctgttatatgaaatttattctctccgtcgatgtaaaatagtttatctttttttacactgaaaaaagttatgttctcgggcaaatcttttatggtatgagattgttgggtactgaaagaatatactttcattgtttctccattgtatgaccataaattattgtgatcgtcagtaataattgtttgtggatttgcgccgctgtgcaattgatatttctgaagtaagggttgtgcattgacaaataagtctttttccctattgtatgtgaagtaatagccaaaacgttctatccagatattattatctttatcaattaaaatctgactgacagaagttgataaatctgttccatcttcagtttttaaatattgctttacattgtatccatcaaaacggtttatggcactgcttgtcacacaccaaagaaagccttcgttgtcttttagcatatctattacttcattatcagctaaaccgtcagaagtagtgagatgtcggaattgataatgctctttcgcaattgttacattaaatataaaacaaagtatgaacaatatctgtgctttcatttaattgtatctttaatatagaattactaggtttaaataaaggactactcattttaattaatcatataacaaaaatagtaaaatattcttgttatattctatttgcaaagataatattcatttgaattcctgctatataggcaggggtgtcttatgtctaaaaatagggtatgaaatgttgattctacaattgaaggtatactgtaatacatatcagaccttggagtaaattgtttgtatttacatttgcatgtgtaaaaaatctttgttttctgtgttcttggtagtttctgtttatctataggtaaatggtttgctttttgggaacaataagttttattaaattcataaatctatgaaaacagtaagtaaaaaagttttaatgtgtgtagctttttccttatctatgttgggaggagttccgtatgtacaggcagatgctccagattgtttgttagcggttcagcaaggagctaaaatttcaggtgttataacagattccgaaggtccgattattggagcttccgtagttgaaaaaggtacgagtaacggaacaattacggatttagatggccgtttctctttagatgtaaaaccaggtgcaattcttgtagtcagctatgtgggatatgcctcacaagaagtaaaagcaacgactggaacgatgagaattaccttgaaggaagataaccaggtattggatgaagttgtagtgacagctttgggtattaagagagagagaaaggctttaggatacggagttgcagaagttaaaggagaatctcttactaaggcgaaagaaacgaatgtaatcaattctatggcaggacgtgtacctggtttggtagtaagccagacagccagtggcccttctggatctacgcgtgttattttacgtggtagtacagaaatgactggtaataatcagccattatatgtgattgatggggtacctttggataatacgaattatggaagtgctggaacttatggcggatatgatttgggtgatggcatttcgagtattaacccagatgatattgaaaatatttctgtcttgaaaggtcctgctgcttcagccttgtatggtagccgtgcgagccatggagttatccttattaccacaaagaaagcggatgggaaagaaaaattcagtgtagaatataatggaactttgactattgatacacaattgtctaagtggaatgatattcagcaaatatatggtatgggtagcaatggtacatatagtattgatgcaatatcaaataccaatacgagttggggaccaaaagcagatggaaataacatgctgacttattttgatggggtatcacgtccgtatttgattattccagacaatacttcaggatttttccgtaccggtttgacagctactaatacagcggtaatcagtgctagtcatggtaaaacgggggtacgtttttcatatacagatatgagaaataaggatattgttcctaaaactcatatgagccgtaataatttctctttgcgtgcaaatacttctttatcaaaagttgatttggattttagcgtgaactatacacgtgaagatgtgaaaaaccgtcctgctatgggagacagtaaagctaatatcggaaagaacctgatgacattagccacaacttatgatcaggcatggttaaagacttatcaggatgaaaatggagaatatagcaactggaacggaatggacccttataatgtaaatccatattggggcgtatataaaaatcagaatatttcccaaaaagaccagttccgtttgaacggtaaggctatttggaatattaatccccacttgaagttgcaaggtacattgggtactgaaatgaactggttcacttttgaagattatcaggctccgactactccaggattcgaggctggccgtttgcagaatagtaccttcgaaaatcgtatgtataactttgagttgttggccttgtataacaatacatggggtgattttgattttaatggaactttgggaggtaatatctttaaagtggataatctgactactattactacagcgcaggatatgcagattcgtgatgtaatcgctttacttagttttaatgaaattagtgtagagcaaaatacatatcgtaaacagattaattcactttatggagctgtaaacttaggttggaagcacatggtttattttgatgcaactttacgtgctgaccagtcttctaccttgcctttgaataataactcttatttgtacccttcattctcaggtagctttatcttctcagagataatcaataagaagaacgcattaccttatggaaaaatccgtatgtcgtgggcacaagttggtagcgataccaatccgtatcagttgggactggtttatacaaagtctaaatatacatatccaggttatacaataggttatataaataataatacagtgcctaataagaatttgaaacccactagaacgaattcttttgaagtaggtttggaaacaaaattcctgaataaccggattggtttggatttcacctattattctcagattagtaaggatcaaattatgggtatggccagttcctggagttcaggctacaactatcgtttgattaatgcgggtgaaatagagaataagggtattgaaatagctttgaatactcgtttgattcaaacaaaagacttctcttgggatttgaacttaaacttctctaaaaaccaaaataaggtaaaagagctggtagatggagtggatatgtttgaacttgaaaaagcgtcatggcttgatgtgcaggtagcggctaaggtgggtgaaaattatggatctatcattggcccggacttccagcgtaacgagaatggagatattcttattgatccgtcgacaggtctgcctatgtatgataagagctcacatatattaggtaatgcatcatgggactggacaggtggtcttgttacaactttggcttataagaatttatcattgtctgctgtgtttgatgtgaaagtgggtgcagatctctattctatgtctgctcgttctgcttatgagtccggtaaggctttggaaacactgcagggccgtgaagagtggtatcgttctgaagaacagcgtaaggcagccggattcccgaaaggttctcctgactggaaacctactggtggatttattgctccgggagtaatagacaatggcgatggaacttatcgtccgaatgatatatacattaatcctgaagattattggatgagtgtttgtcgaaatgccccttcaatgtttatctatgataactcgtatgtgaaatgccgtgagctgacattaacttaccagttcccgaaaaagcttctgaagaatgtagtagataacttgaccatttcatttgtagcacgtaacccgttcatcgtgtataaaaatattcctaacatagacccagactctaactataataatactacaggtatgggattggaatatggttctttgccttcacgcaaaagttatggattcaatgtgaatattaaattctaatctgagtagactcgttacctaaaataaaatagatatgaaatacaataaatcaattttggcaatgctattgaccgcatgtactttttcatttagtgcttgtagtgatagttatatggaagatatgaatacagacccttctaaagcagatataattgaccctaatgcccagcttactactgcggaattacagacgtatggcagattggatatggtcgatatattcagaaactatttatatgcttttaaccagcagttcatgggatgctggaatactacattccatggtggtcgccattttattgataataatattatgggatatggctggacattaggttatacaggagctgtttcaaatttggtagatgcagaatatcgaacaaaagacgatccggaaaaagtgaatatcaatgcggcattgaatattttttatgtatatacaatgtcagttatgacagacctgtatggagatgttccttacagtgaggcaggaaaaggttatctggaaagtatctttactccccgttatgacgagcagaaagatatatatgatagtttctttaaggtgttaagtaaggctgttgatcagtttgaccctgctaaggatgagataacaagtgatgtgatttacgatggagatattcagaaatggaagaagtttgcaaattctcttcgcttgcgttttgcaatgagaatctccaatgttgatccggaaagggcaaaacaagagtttgaaagcgcgttgcaggcagacggaggagtctttgaaagctcaagtgatgatgctttgattaaatatatggaaatttcatatagcttcggatcagaatcatatacagattatagaggaaatgctttgtcaaaagtcctttatggaaatgaccctgccaataatccgacttatctgtgttccactttctttaatcagttgtataataccggtgacccacgtacatttagaatagcccgttgctattatgatggtcttatgagtacttcaagtcctgacaatcgtattgacttgactgaagaaatgatagaaaaaggtattgcatttcagccttgtgtgcccggagcattctcatgggaaccatggcctacgggatatgatagtgatattttgaaggaaatagctgaaaccaatccgaatattgtgtattcagtagcacgtgaagtagaaccgaagctggcaacaactttcttgatgagtgataatcctggagtggtaatgacatattcagaggttatgtttttaatggctgaagctgcattgaaaggatggaatgtagggtcagcatcagtagaagagtattataagaaaggtgtaagagaagcaatgaatttcctttcaaataattatgattgtgaggagattactgatgaagagtttgaaacttattataatgctaatcctataggttatacagacgaacagaaaaaaagttctatcaatacccaagcatggattttacattttctgaatccggcagagtgctgggctaatgtacggcgttctggttatccagttttaaaatcgcctgttgagtatggttttgaacagtatctgacggatggtaaggaaattccagtacgtttctgttatcctactcttgagtcttcgtataataaagataactatgaagaagctttacaaagaatgggaggtaaggatagctggtatactcatgtttggtgggattctgtagattaattgtagattaaataaagagaagaatatgaaaaaaatatatttgatgcttatggcttttgttgctgtaagtttattgggagtttcatgtaaagaggatgagcctttttcaactattacagaagatgattatcctaagatattggatcctgtatttcctgattgggtagatggagaaccagctgtggtctcacagataactcatgatgccaattttacaatgaaattgacagttactccttctgattatacagaagtaacttggttaatagacggagtggaggttcaaaaaggaaatgaaatagatattccactggaagcaggaacttactctttaaaggttgtggcaacgactacaaaaggacaatccacttccagggaaggaaagattgtggtcagtcctcttcagggcgaaccatggtcggaggctgttggctttgaacgaattgtatctaatggggctcgtgctcgtctttatggaaataatttgtctttggtcacaggtgtagtgataggcgaacagacggttcctattgtatcgatgggaagttcagatttgggtaactatgtagaatatgaggttccttcaaacttggaggtgggagaatatcgtatcagccttgtagatgtagaaggaaatagctatggtggaaatcttgtaacggtagttaatgttccggtcatcactggcggatttgcacatgcaacctcacatagtgaatgggttatgactggtatcggattggataagattgcctctcttagtattaatggaaccacagtgactgagtttatcagacaaagttatgacgaaatagtacttacctgtccagaattagaggatggtatgtatgtattgaaaggagagagtgataatggagcagaagtcttgttctattcttcacaaaaaatggagtctgaaatctcgttcgctgtttcttcagaaacattgctctgggaaggacatcattatgtatcctgggatttgccagacggtgatcctcataagacttttaaccttattcctttggaaacttttgaatcgatttatccgggtacaacaatgtatgtaagttattcgattaaggctgacgatgaatatcatcagattcgactgacacatgcagcttgggaaccctattttaccgacccgatagatgtacaagaagacggagtttacgagtttgttttaactcaggaaattttgaatacaatcgaggaaaagggaggatttatttgtgtaggtcacggatattatgtggatcggataactattaagtaatatcttatgtcacaatcttgtccttgtatttttacttggacaagattgtgtttcttaaaggtttctatgttaaccctaattaaaattatgtatgaagcatatattattatatggaagtttgatgatattggtgcttagctcattactatcctcatgttcaagcgaagagaaatctgtaatcatgccggtgcttttgcaaagtaatcctgaaaatgaagctcaagaggttgattttgcactttctgagattgtgctgacgtttaataagaaagtctgtatgtctgcttcggacttggaaaagttacagttaagcccaagtgctcaaatagagaatatctcattttctgatgagattgtcacagtgcagatttcaggattaactccagaaacgcagtatactttgactatacctggtggattattgattgatgatgacaataattctgtaggtgagattaaaatactttttaagaccaaagctttaccggttgacaaagcgccggataatgttggtatggaaaacgatgcttatgcgttgtttaagaaaataaaggttggatggaatttgggtaactccttggagagttatgaagatggattggccaatcacatggattcagagacttcatgggggaatccaattgtgacaaaggagatgattgatgcagtgaaaaatgcaggatttaatgctgtacgaataccggtcagatggtatcctcatgtcgtggatcagaatacgatggctgaaatacgtcttgattggttggctcgtgtaaaggaggtggtagactattgtatagataatgacatgtatgtcattttaaatacgcatcatgaagactggctggaaagccaccctctgaaatcagaagcggaaacggtattgatgaaagaaaagaatctatggcatgcaatcgcatcttatttcagggattacgatgagcgtttgattttttctggcactaatgaagtcgaaataaattggcaggcacctactgctgctaatttagaagtgcagaatcgttttaatcagtgctttgtagatgctgtacgtgctactggaggtaagaattattatcgaaatttgattattcaaacttatgccaccaatcctgattatgcatttgatggacttcttttcccgactgatgtagtggataagcgaatggcaattgagtttcattattatcgcccggcaggtttctcttacatggattttgcagattatacagagactgtatattattgggggcaggactatattcagtataatacagttgtatcaggagaacaggaagactatgtagatgaactgtttggaaagattaaacagctttgggtggataaaggctatccggttgttatgggtgaatatggggtggttacacctcctaaagataagtcggatgggaatgtaaatgacttagcagatactaaaagatattatatgagttatatcacttctgctgccaaaaagaatggtatcgttccaattgtttgggacaatggtactttctataatcctttatatgatggcccatttgtagaaggaaaagaatattttggcttgtttaatagatggtatcagatggaagtaaacatctactctagacccattttggaaggcattatggaaggggctaatactgaatatccattttaaagattgattgtatgagaaaacttataacttttattttaataattgttttgtctgtgggaggatatgcttctcctaaaaagtcgtttgagataaagagaggggtaaacctgagccattggttgtctcaacggggagaaaatactccttccatacaagacggaatgagtgcaactgatttttcccgaatagctcgggctggttttgaccatgtacgattgcccattgatgaagaagtgttgtggcaggaaaatggtcagaaaaataaagaagctttttcttatcttcataaaggtattgagtgggctttaaaaaatgatttaagagtcattgtggatttgcatattgtacgatcacattattttaatgcagggaatgaaggaaagaaaaatagtttgtgggaaaagccggaagcgcaaactcattttcttgcactctggcaggatttagtacaagaattaaagggctattcaacttcagatgtggcttatgagataatgaatgagccgactgctccaaatcatgaggactggaataaactggttgagaaagcctatcagataattagaaaggttgaaaaggaaagagttattgtcatcggttccaatatgtggcaaggggtagatacttttcaatatttgaaggttccccaaggagatgagttcattttgttgagctgtcatttctatgaacctttcctgttgagtcactatcaggcaggttggactgaatttggtaagtatcagggcaatgtacattatcctggttatttggtgtcgaaagatgaatttgattctttatcagcagatgataaaaaattggttgcacgttggcgtacaactccttggaaccgggaaacactgtctgcatttttaagtaaggctaaaagggtagcagatgaaaaggggctgaatttatattgtggagaatttggaatttatgaaaaagctccgatagaatcagcattgaaatggtatgcagacgtaattagtgtatttgatagtcttaatatagcttgggctaaatgggattataaaggaggatttggaatatatacatctcaaaatcagcagaaaaaagatttgcttaaagtgctgatgtctggtagtgggaagaaggtggtcgtaggagagacacctgtttatctggatactcgaaaacctttggagcttcgtgtgaaagatgcattgaacagaatgactgtagaagagaagacgcgtttaagttatgcggatggccgtttcagtacacctggatgtgctcgtttgggtattcctgggttgatgtattccgatggccctcatggagtacgtgcagaaatttgctggaatagctgggattatgctggatggactaatgacagttgcactgcttttccagccttgacttgtttggcttctacttggaatccctctttgtcgaaggcgtatggaacagctatcggggaagaggcacgttatcgtcataaaaatgtattgttaggacctggagtgaatatttaccgtactccgttgaatggacgtaactttgaatatatgggtgaagatccttttttggctgcacgtatgtgtgttccttatattcagggagtacaggaaaatggggttgcagcttgtgtaaagcattatgcacttaacaatcaggaacattggcgtaatcatattgatgtgcaggtgagtgatcgtgcattgtatgagatttatcttcctgcattcaaagctgcgatagaagaaggaaaatcatggactattatgggagcttataataaagttcgtggaacacatgccgctcataataaattactgaataatgatatactgaagggtgaatggggttttgacggatgtgtggttacagactggggagctgcgcatgatacgtatgaagctgctatgtatggattagatcttgagcttggtacttttacaaatggtttgacctctaattcaagcttggggtatgatagttattatttaggaaatgcgtacttgcagatggtgaaagagggtaaagttccgatggaagtagtaaatgacaaagcagctcgcgtgttgagattaatattcagaacggccatgaatgataatggaaagttaggtgctatgtctaatgattctcattatgaaacagcctatcagatagcaacagaagggattgttttgttgaaaaatgaggctacatttaagggagagtctcttttacctttaagtcaaggaaagtacaagcgtgtcttagtggtaggagataatgctattcggaatttgatgcagggaggaggttcctctgaattaaagcctaagatggtgattactcctcttgaagcattgacagagaaattgggaaaagaatgtgtgaaatttactcaggggtatgtagctggacgacctatgtttgatcgggccgatacattttctcagtcagtgattgattctctttatacggcagctgttaatgaagcccagaaagcggatctggttatttttatgggtggacttaataagaattttcagcaggattgcgaaggagatgatcggaaaacattccaattgccatttgaacaggatcggcttatcaaaggccttttgaaggctaataagaaagtggtagtggtgttgacaagtggaaatgctgtggatatgccttggctgaaggaggtcccttcagttatacaatcatggtatctgggctctattggtggaaaggcacttgccgatgtgattacaggtgaggtcactccgagtggtaaattgcctttctcttatccggctaaattagaagactgcccagctcactattatggagaaatcagttatcctggagacggtatccgacaggaatacaaagaagatatcttggtgggttatcgctggtatgatacaaaaaaaatcaaacctcttttcccatttgggtatggattgagttatacacaatttgaatacggaaagccggttgtttcttcttctcagatgcaatccggagatgtattggaaatcaaatgtactgtaagaaatgtaggaaaagtagcaggaaaagaagttgtacaattgtatatcggagatgaaaaatgcagtgtattgcgtccgttgaaagaattgaaagatttttataaagtaacactccaaccaggtgaagaaaaagaggtactgtttacgatagatgaggaagacttgaaattttttgatgatacgcagcataaatgggtggcagaatcaggcaaattcaagatttatataggcagttcatcaaaagatataaagggagttgtagagtttgactataagaattaatactgatattaataattaaaaaagaaataccatgaatttgataaagaacgtagttttggcctcagtgcttggatctggcatgtgtatggcacaaaacgtgcagagcgtgacaccggctatcccagtagataagaatatagaggcaaatattcagaaatggctgaataaaatgacgctggaggaaaaaatcggacagatgtgcgaaattactattgatgtagtaactgattttgaggcgagtaagaagcatggctttacaatgagcgaagctatgctcgatacggtcatcgggaaatataaagtaggatcactcttgaatgttccgttgagtgtggcacagaagaaagaagtttgggccaaagcaatcaaacggatacaggaaatttccatgaaagaaataggtattccttgtatttatggtgtagaccagattcatggaacgacttatactcttgatggtaccatgttcccacagggcattaatatgggagcttctttcaatcgcgaactgacgaagaagggggctgaaatatcagcttacgaaacaaaggccagttgtattccttggacatacgctccagtggttgatttaggaagagatccgcgttggcctcgaatgtgggaaaattatggagaagactgctacgtgaatgcagaaatgggaaaggctgctgtagaaggatttcagggagaggatcccaatcatattggtgaatacaatgtggctgcctgtatgaagcattatatgggatatggagtcccagtatcaggaaaggatcgtacaccgtcttctatttctcgtagcgatatgcgtgagaaacattttgctcctttcctggaggcgattcgtcatggagccttgagtgtcatggtgaattctggagtcgataacggaatacctttccatgccaatcatgagttgttgacagagtggttgaaagaaggattgaactgggatggcatgatagtgaccgactgggcagatattaataacctttgtacccgtgaccatattgcagctactaaaaaagaagcaataaagatagctattaatgcgggtattgatatgtcaatggttccgtatgaagtcagtttctgtacttatttgaaagagctggtagaagaaggagaagtaccgatgagccgtattgatgatgctgtagcccgtgtgttacgtttaaaatatcgtctggggttgtttgaaaatccatattgggatattaaaaaatatgataagtttggatcggaagaatttgcaaaagttgctctccaggctgctgaagaatcagaggtattgttgaagaatgaacagaatgtattaccggtagccaaaggtaaaaaaattcttctgacaggtcctaatgcaaactctatgcgttgtttgaacggaggctggtcttatagttggcagggaaataaggcagatgaatatgccggagcctataatacgatttatgaagcgttctgccataaatatggaaaagaaaatgtggtttatgagccgggggtaacttatgcagcatcagaccctaatgccataacgaatcaaaatgataactggtggcaggaaaatgagccggaaatagaaaaagttgtggctgctgcagcaaaggttgatgttattgtagcttgtattggtgaaaactcttactgtgaaaccccgggaaatttgacagacctgacactttcagaaaatcagcgcaacctggtaaaagcattagcaaaaacgggaaaacctgttattttagtgttaaatcagggacgtccgcgtatcattaatgatattgaacctttagctcagggagtgattaatattatgcttcctagtaactatggagcagatgcgttggcaaatctgatgtctggtgatgcgaattttagtgccaaaatgcctttcacttatccgaagtatattaatgcaattgccacgtatgattacaaaccttgtgaaaacttgggacagatggcaggaaactataattacgattctgtaatggatgtacaatggccgtttggttttggacttagttatacaacttatgtatacaataacctgaaagttgataaaacttcttttactgctgaagatgaactgacaatctctgtagatgtaacgaataccggaaaggttgcagggaaagaagcggttttgttgttctcaaaagatttggtggcaagtagtactcctgataatattcgtttgcgtaattttgagaaggtatacttaaaaccgggtgaaacaaagacagttacaatgaagataaaaggcagtgatctcgctttcgttggctatgatggcaaatggcgtcttgaaaagggagattttaaaataaaatgtggtaacttgtgggcagatataaaatgttctgaaacaaaactatgggaaactgctaataagtaactttatgaggtatggtattttattattgggtttagcttttttaggctgtgctcgtcccgatttccgtgactcttccttaccttccgaacagagggcagagctgttgttacaggaactgacgctggaagaaaagatttccttaatgatggatgtatcaaagccggtggaacggttaggtataaagccatataactggtggaatgaagcattgcacggagtggcacgtgctggattggctacggtatttccgcagtcaatcggtatggcagcctcttttaatgactcgttggtatatgaggtatttacggcagtgtcggatgaggctcgagctaaaaatgtatattatgcgtcgaagggaagttatgaaaggtaccaagggcttacgatgtggaccccaaatgtgaatatttatagagatcctcgttggggccgcggaatagaaacatacggagaagacccgtatctgactacttgtatgggggtaaatgtagtaaaagggctgcaaggtgtcaatgacggaaaatacgataagttgcatgcctgcgccaaacattttgccgtgcattccggaccggagtggaaccgccattcttttgatgtagaagatttgccgcttcgtgatttatatgaaacttatttgcctgctttcaaagccttggtacaggatgcagatgtgaaagaagtgatgtgcgcctataatcggtttgaaggagaaccgtgttgtggaaacaaacgtctgctgactcagattctgagagaagagtggggatttgatggtatcatattaagtgactgctgggcaatcaatgatttttttgaggaaaaaggacatcgaactcataaagacgctccttctgcagcttctgcggctgtgttgagtggtacagacctggaatgtggttcaacttatgaatcgttgatagaagctgcaaagaaggggatgatagatgaaaaagcaatagaccgttccgtgaagaaattgctgaaggcccgttttgatttgggagaaatggacgatccctccaaagtgtcctggacaaagattcctttctctgtagtggcttctgccacacatgattcgttggcattgaaaatggctcgtgaatcgatgacattgttgctcaacaaacaaaatgtgcttccattgaaacgtggcaatttgacggttgctgtaatgggacccaatgccaaagattctgtcatgatgtggggaaactataatggagtaccggcccacacggtgaccgtattggatggtattcgtgcagctcttggaaaaggagataaactgatttatgaacaggggtgtccttgtgtaggtgatgatttgctggagagtgtgttcagtgagtgcaagtcggaaggcagacctggattcagtgcccgttactggaacaatgtgaaccacgaaggaaaagtggatgtagaaacacgggtgatgactccgttcaacttctgtacttcaggggctacggtgtttgcaccgggtgtgaatctgacggatttctctgcaacctacaatgcgacttatgtaccaaaggcttccggtgaggttatcttcgatgtgtacagctttggcaaaggacggttgctggtgaatcagaaagaagccatgtcattttataatagtcatggcggaaacaagcaatcgtatgctttacaagtggaagcagggaagaagtatgacattgaattgcagtttgaatatctgcagagtgatgcgcagctgaatttcgatatgggctttaagaagaaagtggatattgcccaatctgtcaatgcggtccggaatgccgatgtcgttgttttcgtgggaggtatctccccgagcctggaaggtgaggaaatgggagttgatttgcctggctttaagaagggagaccgtaccagcattgagctgccggaagtacagcggaatttgcttgctgccttgcatcgtgcagggaaaaaggtaattttagtgaactgctccggttcacctgtcggactggttcctgaaactgagacttgtgaggctatcttgcaggcctggtatccaggacagcagggtggtcgggcggtagccgatgtcttgtttggtgattacaatccggccggaagattgccggttactttttaccgaagcatcgagcagttacccgattttgaagattataatatgacaggacgaacttatcgtttcatgaaagaacgcccgctgttcccgttcggatatggcttgagctatacgacgtttacatacggggcagccactttcagcaagcagacggtaggcagtgaggataatctctctctggtggttccggtttcgaatacgggcagccgggatggagaagaagtggtgcaagtctacctgagtaaggtgggagatgaggctggtccggtcaagactctgcgtgcattcaagcgtgtatccgttcccgccggaaagacagtcaatgtacacattaccttgtcaaagaaagatttggaatggtggaatgaaggcacacacagcatccagttctgtccgggagaatatcaggtatggattggaggtagttcggatgagaaagcgttaagcaagtatgcaatacagctgaagtgatgtgaatttccctatataacaggcagggcggtacctgagaaataaaggtatcgccctgcttgtttttataatactatactctcttatagaatcagttcataatctacgattcctaaccacttcccgaatttacggcctacttcccgaaaataagataccttttcaaaccctaacttttcgtgcagggcgtagctggcttcgttaccttcggtgatgcaggctatcagggcatgcagttcgtagcggcggcattcttctattagatgcagcatcagttcttttccgatacctttcccggtatgcgaaggagccaggtagatggtggtctctgcactttggttgtaagcagccttttctttccatccgtgcacatagcagtagccagcaatctgcccttccgtctcatatacaaagtacggatacttctcattgatgtgctggatacgtgtccacatttcctcttcgctcaccggttccagttcaaaggtgatggtagtgtgggcgatgtaatgattatagatggcagtgatggccgatgtatcttctttgcgtacctttcgaatcatattaaagtattaagccgagggtgagtaataatccaaaaataagcatattgcgggaggtttctcccaaaattccgttcagggctttcccgcggtagatacgggccatgtgctgggtagtcaggatgtgtggaatcaggtacagctggggtagcagtacggcatagattttcccgatttccaggaagtagaagcagcaccagcaggccgccagtcctaacagaaagtaaagaatcagtccggctttggtacccaggcgtaccacgatggttttcttgccgctgatagcatcctgttcacggtcgcggaagttattaatcatcagcagggtatcgatgatgaggccgcaggccagtgaagccatggtgacagacatgttccagtcgtgcgccatgacatagtaggtacatcccacgggtacgaagccgaagaaaacaagtaccagcaagtcgccccatccgtgataagccagcggatacggtccggcggtatagaggaaggcaaaaatcatgcaggcaataccaaccggaatcatttccagtcctccgtagtaaagcaggcaaagtccggtgattcctgctaacagggtggtacaggcaattccggctttcatggccttggcgctgatccatccttgtgcacaggcgcgttccgggcccagccggtcttcgcggtcgctgcctttcagaaaatcaaacaagtcgttgatgaaattggcgtcaatttgcatcagaaacgcaaacagaaagcaaagcaaggcaggcgttaattgaaagtgaccgtaaataaaggccagcgcacagcccagcatgacgggtatggcagcaccggtcaatgtcttggggcgggcagccaacaaccaggcttttatggaattggttttgacgtttgtcattgtggattgatttttagtttttcgtccggcaaagttaggtatttttttacgacctttgtcacgaccggatagttatatgtattttaaaatgatgaaacgattgaacttgctggcaggttgcctggtggtgctatgtgtcctgctttcttcttgtgctacggcttctttttccaaatataaaggcgtggggcgtgtaaagcgctatgatttctacagtgcccagttgcccgattctttcgatggtttccgtgtggcttttgcttccgattttcattacgagagtcggtttaccgcccgtcgtttgccaggcatgtgccaggcacttcgttcgctggatgcggatgtgttgctactgggaggtgactatcgggggcgtaacggaggagatgtgacgcaactctttcaggcgctgaagacggtggagacaccctgcggaacgtatgccgtgatgggaaaccacgagcgtgggcaggctgactcgctggcacggaaggccatgcaggaaactggggtacacttactggagcacaaggtggataccttgtggaggggaaaggagtacattttgctgtgtggcattcgtaacccgtttgacctgaaacagaacggggtgtcacctaccttggcattgcaggaagaagatttcgtgctgatgttggtgcatacacccgattatgtggaggatgtgaatgtggcgcacaccgatttggcactggccggacatacgcacgggggacaagtcagtttgttccgccgatggacgccggcacatttttccaaatacggcaaccgtttcctgacggggttgaagtataacagtgcgggtattccggttattgttaccaatggactgggcacttcccgcaaggatgtgcgcttgtttacaccgagcgaggtggtgctggtggtactgcacaaaaagaaatgattaccggtacaatcctttttcctgaataattctgaatacttccggatgcaggaaatagcgcaggtcttttccttcccggatacctttgcggataaaggtcgaactgatctcgataaggggagtttgtacgactctgacatgaggaggcagactggctgtatcctccaagggataaccctggcgaggatagaccagaatgtggtggcggcggatgatttcttcgggcgaccgccagcggtcgaaagcctgccagttgtcggcaccgataatcaggtgaaactcccggtcaggataacactcggccagtttatcaagggtatggatagtgtatgagggacgtggaagttggaactcaaagtcggatgcgcggaaacgggggtatcctgccacggcagcttctaccattttcagccgcagatggtcgtcgagcaaagtctcgttctgtttaaacgggttctgaggggtgactaaaaaccatacctcctccagtcccccatattcacacaggtagttggcaagtgccagatggcctgtatggatagggttgaaggaacctccgaaaagtccggtttttatttgaggcttttcttccattgtctgtagttgattatctgccaggcagctaccagcagcatggctacggcaatgatgtattcttcttttgctacggccaccacccctacggcaatggctgccagcccgatgacgatacaaagtatggtcatcatgaacatgattttctttgggtctttaggcatatcagcaaatttattgttgaataaaatcgcgaatggtcttcaaggcttctgcttgagccttttccaaattgtcgttgacaatcactacatcgaatttttcggcatagctcagctcgaaggtcgcttttgccagacggctttcgataacttcgggcgcgtcggtaccacggccggtcagtcgcttgcggagctcttcgagtgaaggcggctggataaatacagacagtgcgcggtcgccgtagaatttcttgatattgcatccgcctactacgtcgacatcgaaaattacattctgtccggctgctagctgtttttctacctgtgctttcagtgtgccatagaaacggtccttgtacacttcttcgtattccagaaactcattgttggcgatacgctgcttgaattcttctggtgtcaggaagaagtattccactccgttctgctctgtgccacggggcgcgcggctggtggcagagatggagaaggacagattcaggttctgtgtcagcaagtaattgataatggtggatttaccagagccggagggggctgaaaaaataataagtttgcctgccatattcttttttacattacgttcaacacttgttccttaatctgttccagttcgtctttcatctgcaccacgatgttctgcatttcggcatggttcgacttgctgccggtggtattgatttcacgtcccatttcctgagcgatgaatcccagtttcttgccttgtccgtgtccgccagccatggtttcgcggaaatatttcaggtggttggccagacgctgcttctcttcgttgatgtccagtttttcgatgtaataaatcaactcctgctccagacggttcttgtcatagtcgatgctcagcgttttttccagtgcatcggtaatgcgctcccgtatcttggccacacgttctttctcgtaaggctcgatggatttcatcaactgttcgatgttgtcgattttttctgtaaatttcttttcgagagctgctccttcctgcttgcggaagtcaaccagatgttgcagagcggtttcgatggtttgtttggctgcagtccattcttcgtccgacagttcctgcacgtctacgcgggtcagcacgtcgggcatgcgcaacaaagtggcaaaccagtcttccggcaacggaatatggcaagtttcagaaatggtttttatctggttgtaatagttttctaccaaggctgtattgatgggagtagccgattcggcggcgtctttttccacccatatagagaagtccactttcccgcgttccagtgtctgggcaatcaggttgcggatttccatttctttttcacgatacaatggagcgatgcgtgtggataagtccattgctttgctgttcaacgatttgatttccacgttgatttttttgtctccgaacactgtgactgcttttccgtatccggtcattgactgtatcataactccttctgtttttttgataatttggatacaaaggtaggaaaaatctaaataaagaataagcagctgttaaaaaaacgtgtgaaaactcagatgcagtttatgaaaataaggattgcttctttggataaatatttatggtcttgtttattctttgcaatctccttgtatattctctgtttcacagtgcgggatttgtatcccgcactgtgaaatatgtatcccacactgtggtttttatatttcacactgtgaaacagagaatttgtcaggaacttaaaaagaattttttagtgtcttttttgttttcgtggttaggtatatgaaaaatgctttgaagtgagaatctttcagaacagcttcttcactttctgtctcttttttcatgagatagtgagaagaaaagtgtatatttgcagactataataattgtatcgagtttaattatgtcatgcattttacatattgaaacatctacggaagtttgttctgtggctgtaagccaggatggagcttccattttctcaaaagaagattttaacggcccttcgcatgccactgtattgggggtatttgtggatgaagccttgtcgttcattgataaccatgccattccgttggatgcggtggcagtaagctgtggtcctggttcgtacacggggctgcgtattggtgtgtcgatggcgaaaggtatctgttacgggcggaacattccgctgataggattgcccacactggaggtgatgtgtgtgccggtactgcttgcgcatgacctgccggaagatgctttgctttgtccgatgattgatgcccgccgtatggaagtatatgcggccgtgtatgaccgtgctttgaaggtgcagcgtgccattggagcagatattattgacgaaaattcgtatgccgaatatttggagaaacatccggtgtatttctttggtaacggagcagccaagtgcaaggaaaaactttcgcaccccaacgcacacttcattgagaatattcatccggtagccaaatggatgttcccgctggccgagaaagctatggcagtggaagatttcaaggatgtggcctatttcgagccgttctatctgaaggaattcgtggcttccactccgaagaaactgctgtaagggcgtatggccggagagggtgaggcgtaaaaagatttgatttgtagaataacagaattttatatggaatataatacccagcaacgaaaattgccacttccggagtatggacgaagtgtgcagaacatggtagaccatgcattgaccatcgaagaccgtgaagagcgtcagcggtgtgccaatacgattgtaaacataatgggaggcatgttcccgcaattgcgcgacatggaggatttccgtcataagctgtgggatcatctggccattatgtccgacttcaaactggatattgactatccggtggaaattgtgaagaaggaaagtttggaagtgaaaccggacagaattccctattctccgaacgtcattcgtttccgtcattacggacggttcattcaggacttgattaagatagcagtagactatccggaaggtgatgagaaaaaacagctgataaaatatatcgccaaccacatgaagaaggattacatcaacttcaacaaagacggggtggaagaccagaaaatcctggaggatttgtgcgagctgtcagaaggacgtatcaagctgacgacggatgacttgaagctggtggaacagcgttcgttcggtccacgtcgccgtcagatgaacaataacaatcagcagaaaaagaaatattaatcaaaatcggatactatggcttcatttgtaatcgaaggaggacacaaactgcatggcgagattgtgcctcagggtgctaaaaacgaagtattacaggtactttgtgccacattgctgacagatgaggaagtgactattgaaaacattccgaacattctggatgtgaacaacctgatacagttgcttcgtgacatggggatgaaggtctctaagtcgggaagtgatacctacacttttcaggcagataatctgaatctggcttacctggagagtgatgacttcttgaaccgttgctctaaattgcgtggttcggtgatgctggtaggccctttggtagctcgcttcggaaaggcaatgattccgaaaccgggtggtgataaaatcggacgccgccgtctggatacgcacttcctgggtattcagaaattgggtgcctcgtttgaatatgatgccgtgaatggtcgtttttgtatcaatgccgagaagctgaaaggcgcttatatgttgctggatgaggcttctgtgaccggtacggccaatattgtgatggctgctgtattggccgaaggggtgacaacgatttacaatgcagcctgtgaaccttatttgcagcagttgtgccggatgctgaatcgcatgggagctaagatttcgggtatcgcatcgaacttgcttaccatcgaaggcgtatccagcttgaaaggttgttcgcatcgggtgcttccagatatgattgaggtcggcagtttcatcggaatggctgccatgacgggaagtgaaattaccatcaaggatgtatcctaccagaatctgggaatcattcccgacagtttccgtcgtttgggtatccgcctggaacagcggggtgacgatatatttgtgcctgcgcaggaacattatcagatagagtcgtttattgacggctccattatgaccattgccgatgcaccgtggccgggattgactcctgacctgctgagtgtgatgctcgttgtggctactcaggccaagggcagtgtgctgattcatcagaagatgtttgaaagccgtctgttctttgtggacaaattgattgacatgggagcacagattatcttatgcgacccgcaccgtgcggtggtaatcggtcatgaccgcaatttctgtctgcggggcggcaacatgacttcgccggatattcgtgccggtattgccttgctgattgcagcactgggagcagaaggaaacagccgcatccataacattgagcagattgaccgaggataccagcatatcgaacagcgattgactgcactcggtgcacgtatcacacgtattgaataaatatgattagaaaagaagaagtatttaaaataggaatcatcaacaagccccacggagtgaagggtgaggtgtcgtttacgtttaccgatgatattttcgaccgggtggactgcgactacctgattctgttgctcgacgggattctggttccgttctttatagaggaatatcgcttccgctccgacaatgcggcgctggtgaaattcgaagggatagacacggccgaaaaggcacgtggttttaccaatgtggaagtgtatttcccgaagaagtatatggaagaacaggatgaaatcacttcctggaatttctttgtcgggttcaaggtgcacgatgtgcatcatggcgacttgggtgaagtggtagatgtggatgatgcgacgatgaatgtgctgtttgtcattgagaaggagggggaagaactgctgcttcctgctcacgaagaatttatactggatattgacaaggtacagaaagtgttgacggtggatattcccgagggattgttggattaaaaaccagattaggtatgaaaaagaaaggtcgtaaagcattctggcggaacattaagtttaagtataagctgaccgtcattaatgagaatacactggaagaggtaattggcattcatgtgtcgaaactgaatggtttttcggtgttgctggctgcttgtacggtaatctttcttttggctgccatcattattgtgtttactcctttacggaactacttgccgggatatatgaacagtgaggtgcgttcgcaggtggtgaccaatgcattgaaagccgattcgttggttgaggcattggaacgccagaaccgctatatcatgaatattcaggatattttcagcgggaaggtgaatgtggatacggtgcagtcgattgactcgctgactaccatccgtacggaggaattgatgaaccgttccaaggaggaagatgattttcgccggaagtacgaagaacgggaacgggcggcagcaatggcgggaacggatgagcatacattgccggacttgttgtttttccgtcctactcgtggaatggtggtgaaggactttgcgccttcgcgtcatcattatggagtggatatggcagcctctgtcgatgagagtgtactggcggctctggatggtacggtaatgctggtggtgcagactgccgacagcggggtactcattcagattcagcatgaacagaattttatatccgtatataaacattgtggcccttcccggaaaaaagaaggtgaccaggtgaaagggggagaagtaatcgcattggccggaacatcggacgagggcaagcatgtgtcgcatgtgcatttcgaactgtggcatgatggcaccccgattgacccggcgaaatatgttgtattttaagcttatgaagaaacagattgccatattaggttctaccggatcaatcggtactcaggctcttcaggtaatagaggagcatcctgatttgtatgaggtatatgcccttacagcgaacaataaagtggatttgctggccgaacaggctcgtaagttccaaccggaagtggtggttatagccaacgaggataagtatggaattttgaaggaagcactggctgatttgccgattaaggtgtatgccggagctgaagcgttgtgtcaggtggtagaggcacagcctattgacattgtactgaccgcgatggtgggctatgccggtctgaagccgaccatcaatgccataaaagctcgaaaaaccattgcactggccaataaggaaacgttagtggtggctggtgaactgattactgcgctggccagccagtatcagacaccgattttaccggtagattctgagcattcggctattttccagtgtctggaaatgaacaaccctgtgcataaggtgattctgacagcatcgggaggtcctttccgtacctttaccatggaacagcttcaaacggtgactaaggagcaggcattgaaacatcccaactggtcgatgggagcgaagattaccatcgattctgcttccatgatgaacaaggggtttgaggtgatggaagctaaatggctgtttggagttactccggaacagattgaagtggtggtgcatccgcagtcggtcattcactctatggtggagttcgaagacggagcagtaaaggctcagttgggcgtacccgatatgcgtctgcctattcagtatgctttttcttatccgaaacgggaatcgctttcgggcgagcggctggattttgctaagtaccacaccttgacgttcgaaaagccggatacgacacgcttccgtaacttggctctggcctatgaagccctgcatcagggaggaaacatgccttgtattgtcaatgcggcgaatgaagtcgtggtggctgcgttcttgaaagaccagatttctttcttgggaatgagtgaggtgattgaaaaatctatggcgaaggttccttttataaagacacctacttacggagattatgtatcgaccgatgcggaaacccgtcgtattgcggcagaactggtgattaatggaatgaaataaacaatgtctaattataaaaaagtaagaagttaagtagaaatggaaacatttttgattcgtgcccttcagttgattctcagcttgtcgctgttggtcatcattcacgaaggaggacattttttcttcgctcgtctgtttaagattcgcgtagaaaagttttatatatttttcgacccttggttttcgctgttcaagtataaacccaagaacagtgatacggaatatggagtaggctggttgcccttgggaggatactgcaaaatctcgggaatgattgatgaatcaatggataccgagcagatgaaacagccggctcagccgtgggagttccgttccaaaccggcgtggcagcgtctgctggtgatggtaggaggcgtcttgatgaatttcctgttagcgttgttcatctattccatgattctctttacatggggcgaccgttatacggccttaagcgacatgacgatgggtatgaagttcaatgaacatgcgcaggaaatcggtttccgtgacggcgatattctaaagagtgccgatggcaaggaactgactcgcttcaatatggatatgattcgtagcatcgtagaagctcgtgaggtgactgtcttgcgtcagggagaagagaaaaagattttgctgcctgagttaagcttgttggatgtggcaaaagaagacccaatgtttgtggatgtgttctatccgaatgtggtcgattctgtacttccggacggtggattcgcgaaagtgggtattcagaaaggagactctttggttgcatttaatggcaaagagatgacttcatggaatgaatttctggacaacatggctgagttgaaggcaaaggctgagttggataagaagacttcggctgcctttacgctggtttactcacgtgcaggagtgcgtgataccgtagatgtgcagacggatgataaattcaaggttgccgtaataggtggactggtggactataagcaacgtacgttgagctatggcttctttgaatctttcccggcaggagtagctttgggcgtcaatacgttgaaaggctatgtgaatgacatgaaatatgtgtttaccaaggaaggagccaagagtgtgggcggatttgcgactattggaagtatcttcccgaaagtctgggactggcagcgtttctgggagatgactgcattcttgtctatcattctggccttcatgaatatcttgccgataccggcactcgacggaggacatgtgttgttcttgctttatgagattattgctcgtcgcaagccaagtgacaagttcctggaatatgcgcagatggtaggtatgttcctgctgttcggtttgcttatctgggcaaactttaatgatgtactgaggttcttgttctgatgaatttatagaaagtatagtataaacagacacaaggagatacgaagcgggattgtcggctttgtctccttgtgtctgttttgtttaatcgataaataaaaagaaaatatgatgaaaaaaatcctattggctgtagtgctgtgtggtggtctcggattgacgtctgtttctgcccagcaggcggaagaacgtctgccaggctacttgcaggccgagaaatttaccaaaagtaagctggacaaaatgttgttttctaccaccgtggacccacattggtttcaacagggaaacaatttctggtttgagtataaaaccagtgaaggaaagttctggtatgtggtgaatccgtcagctaagcgtaaagaattattgttcgaccgtgaacagatagcctcacagctcaccgaaattgtacaggacccttttgaagcacgtcagttacctattgcagaattgaaggcgggagaagacggacgtacctttacatttaaagtcgtttcaaaggctgattccacgttttatttctcgtacgactatccgtctcgtaagctgacacacctgaaagacaaaaagatggaactggataagccggattgggcttctgtatcgcccgatggccagcgtgttatttatgccaaggattgcgatttgtactatatgagcatcgctgattaccagaaggctcgtaaggatgagaaagatagtacgattgtggaggtccgtctgacaacggatggtacaccggattttgggtatggtattccatacagtaccttgaacacagatacgctgtgcaatggaaaacgtcgggaagtgtggggatactggtcgccggactccaaatattttgctacgattattgcggaccagcggaatgtgaaaccgttgtgggtgataaactccattgcagagccacgtcctactctggaaacttataaatatgagatgccgggagagacaggtatgccggaatatcatctgtatttgttcgatgtgcaggcaggtacacggaaagaaatcaagacagcggcgtggaagaatcagtcgattgacttggaaggtaaaccctttgaacagaaacagcgcgatatggaactgattccaagaatctggcaaggggataacaaccgtttcttcctgacacgcagcagtcgtgacctacatcgtattgatgtatgtacttatacattgggtgctgattctattgtacctatagtaaaggaaagaatgaacacctaccaggaaacacgtcctattcatgtgctgaagggaggaaaagagtttattcagtggagcgaacgtgacggatgggcacacctttacttatatgatgataaaggaaacttgaaaaatcgtatcacagaaggtccctggcatgtggaacgtgtggtaaaagtagatgaggctacacggacagtctattttgtggccaatggccgggaagcaggtgaaaatccctattacgagcatttttataaagtaaatgtggatgggagcggtctgaaacagcttacgcatggtgaattcttccatgatgtagagctggatgacgatgcccgtttctttgtcgataattattcacgtgccaataccgttccttgtgctgacctgttggacaataacgggaaaaaggtgatgaccatacaggaaagtgatttttcttctctgaaagctgccggttacaaattcccagaacctttcaaggtgaaagccgccgatggggtgactgatttgtatggagtgatgtacaaaccttttgactttgattctaccaaggtatatcccattattgattatgtgtatccgggacctcaggtagaggcagtggattatccgttccgacgcatgagtgtccggacagaccgtctggcacaagccggatttatcgtgattacggtggggcagcgaggtggccaccccagccgttccaaatggtaccataattacggatatggaaatatgcgggactatccgttggccgaccataaggcagcagtagagcagcttgccgaccgttatgcttttattgatattacgcgtgtgggaatccacggacactcgggaggtggctttatgtcgacagcagcaatctgccagtatcctgatttctacaaggctgcagtttcttgtgccggtaatcatgataaccgtatctacaaccgctggtggagtgaaacacaccatggggtaaaagaagaagtttcagaaaagggagacactacttttgcctataagattgccaccaatccagagattgtaaagcagttgaaaggacatttgatgttggtacatggagatatagacaacaacgtgcatccgggaaataccattcgcgtggttaatgcactgattcgcgccaacaagcgttttgatatgctgacattgccaggacagcgtcatggtttcggcgatatggatgaatatttctattggagaatggttgatttcttctcagaacatttgaaagggaagaaagaatcatcagtagatattcctcagcgataagataaccttacatattgatagcggcgggatggtgtaggctgttccgccgtaattgtatctggtcagttacaaatgattagaggttacgtacggatacaaaaaaagcgagagtttgctgaacctccgctgccttcctaaagaacccccatttaagggttcttttcatctacatactttttgtgtttcctgttatccttactttttctttctttttacctgaagatattcccaataccttctcaaacctaattcctgaaaacttttacctttaaaatctaatacctaaacttaaatctaatctaaataccttaatcctaataccttaaatagtctagctaataccttaaataaatattacttttttaccttatgtattctaatacctaaatgtttttctctttttacctattggtttcacaaccacattgcaaaggtaattcttttttgattgatagcaagaacttgcaagatgtttttttaataaatagttgttttcatgatataaatcaagaaaagggctatttttagtctttgtgcacggaaacggtgaccgtgtacgacaacgtttttctccgtgtgcgataacaatataacgaaacgggaaacgggtataaaatatatccctcgattttagttacgaatttattaactaaaatcgggggatatgctaacgaaccaatgttttgctatttcagtttaaggattcgctggttactgctcccgcaaaagtccagaaaaggagagtagagcgattcgataaaagggccgtccacgagtatgtcgatgtaggggagtagtttctggcggatagggtcctctttcagttgttcgtacgtatatccagtgtaacaccagatattcatgcctgttcgctggctgacttctttcaggacaggcagaaactcttccggattgtaaaaagggtcaccgcctgaaaaggtcactccgtccagcagaggattggcattgatttcctgaatgatttgctccagcacctcctgcgtgagaggtttgccagctttcgggttccatgattccggattgtgacatcccttgcaacgatgggaacatccagccagatagatggaataccggatgccctcaccgtcgacaatcgtttcaggatatgtatataaataatgtaacatgtacgtttcctttcggcttatgcatgctttacacggtcgtgctcttccgctctcttggcagagttccagctgctaaggtcgcctgtcaggtaaccggtgatacggcgcatgcgcaggatattctcactgttgcacaccggacaacggctatagatgactcccttgtagccacaatcgtgacaagtatctaccgggtggttgatagaaccgtatccaatctgttcgtcgtgcatcacctttacaatcttcgcaatggcctttacgtttttctgcgcctcgccatccagctctacgtaggtgatgtgtccgccacgtgtcagcgcatggaaaggagcctcccgcttgattttctcaacaatagtaatcggttcttttacgtccacatggaaggagttgacataataatcacggtcgtttaccccttcaatgattccatatttccgtttgtccatacgggtaaatctacctgacaatccttcggcgggagttgccagtaccgaataattcaagccgtatttccttttatagtcttcggccaccttgttcatctcttcaatagcttcgtaaagtgtgttccacgcctgctggttgtgtccatgtccttggccgtataatgccatcatggcattgtgtcctccgataaaaccgatacctaaagtaccttgtttcaacacatctcctacttcttcgttgggatgaagggtacctccacctttccatacattattgcccatcatgaacgggaactgacgtgcaagagcggtacgctggtactggtaacggatatacaactgttctgcgatgaattcagccatggagtgtactgactggaggaaaaattcctttgctttctgaagcttgccttccggagtctcgttagtcagactttctgctttccggtgcgcttcgatggccagacgaggcaggttcatggtcgtgaatgaaaggttacctcttcccaatgaagtcttttctccattcaggttctcgaatacgcgtgtgcggcatcccatggtcgccagttcgtaacggtaacgtttcgggtcatcggcactccatttctcgtgtttgttgaacggagtatccaggaacataaagttggggaacaacgctttggccgtcgtacgacatgcttgcaggaagaggtcgaaattcgggcattcaaacttcacttctcctgagagagctgcttcaaaatctttcatagccagttgataatcggcttcagaatagctcactccgtcttttaccttaaaaatctggatagggaagaccggaacttctccatgatttcccaagccttcgatggtagccttcaataattcctgaatcaccattcttccttctgccgaggtatccgtaccgtaattgatggagctgaataccacctgattaccccctctggaatgcatggtgttcaagttgtggatgaagccctccatggcctgatgtgtatctttgcgggtttgtgccagcgttttgcggagcacatacttcaattcgtctgctgtcaggttgatacctgccgcttgcaaagaatccaggtaagccttttctgtttcttcgttaggagcgatgctgtggaaatgggcacgtatccctttcaggatttctttctcgtccgttgtgtgtcccttgatgtcgagcagcaaacctaaatgagtagccatgattttctggaaacttttcagcactcccttggccatgaaaaagtcgaaggccggaattgcctgtcctccgtgctgttcattctggttcgtctggaaaatgatggtagccagtgttgcgtaactctggatggactgcggcgtacggatgcttccgttcttggtgtgaaatccgcgttcgaacaaatcatctaagtcatactgtatgcaggtagtcgtctttgtgggataataatccaggtcgtggatgtgtatgtcacccatctgatgtgcttctgcatattttttcggaagaagatatttgtaagtatagtccttggtgatttctgaagcaaaagtcatcatctgtccggccggtgtatggcttgacatgttggcattgctcaggtttacatcattcttgtcgatggccacaatgccatccatgatatgcttgatgtgcgtcttccggtctctttccgtatttctccactgacggtagataatgtatttcttggccacttccggctgcaccttcattaattcgttttccacgaggtcctgaatttcttccacaccgatggttggctgtgagaagtgtgacaccacctgccgggtaatcaggtccagttcctctctctgctgaggaataccggttgcttcgaaagcctttccgatggcgttggtgattttagcggctgaaaagttttcctgctttccgtcgcgtttgatgatgcggatttctgtcaaattcatttctttcagttaaatgaggtaaaacataaattatacttgtgcttttccgggcaggtcttctgactgatctttccccacagacgccttcccatgagttcgattcacagtggcttgcaatgcatgtccaggtttacgcaagaatcacagcagcaggtactgttgccgatttccacggcattcccttttgaaacggttaggttaccttttgaaaagcaggacaaagatagagatttgggagaaaaataaaaaatgagattttccggatgtttctaaattcaggaaacttttaatgataaaatatgcgctgtagtatgctgtagggcagtaaagtggaaaactctaatttataattcctgcctgatattgaaaatcttgaaatatttttatagcttatctgctcgccaaaagtatgaagaaaaaattctccggaatttccatcagaataggctgacagaagttccggaagatgaggttaggttatttcttttcaggcagatttacaggcttcaagcccatctgttccgcctttttcagcatatattcaaaggcggcatcgtgctcgttcgggatggcaccatccagaatggcatccttgatagagcttttcagacttccgatttcacggcaaggctgcaaattgaatacctgcatgatttcggctccgtctacgggcggttggaagttccggatacggtctttttcttccaaatctttcaacttctgtcgcaccagcttgaaattatccaggaagcgttgcttgcgggcttcgtttttggaagtaatgtctgcttcgcaaagcatcatcaggtcgtcgatatcatcaccggcttcgaagagcaggcggcgtacggccgagtcggtcacttcttcatcggcaattacaatcggacgcatgtgcagaccgacgagtttctgtacgtacttcattttctcgttcatcggaagtttcatcttgcggaagatttccggaatcattttctcaccgatgaaattgtggttatggaaagtccatcccgccttaggttcccagcgtttggttctcggtttgccaatatcgtgcagcagggtagcccagcgcagccacaagtcattacttacgcgtgaaatattatccaccacttcaagcgtgtggtagaaattgtctttgtgaccgcgtccgttgcgcacttccactccctgcagtgccaccagttccgggaaaatcagttccagcagtccgcagcggtccagatcaataaagccctttgaaggcacaggtgacagcaaaatcttgttcagttcgtcggcgatacgttcgcgcgaaataatcttgatgcgttccttgttgcgctccagtgcttcgaacgtttcatcgtctatatagaaattcaattgcgtggcaaaccgtatgcagcgcatcatgcgcagcgggtcgtcgctgaacgtgatgtccggatcaagcggagtacggatggtacgttccttcaggtcatccagaccgtcgaaagggtctaccagttctccgaagcgtgccttgttcaggcagactgccatggcattgatggtgaagtctctgcggttctggtcgtcttccagcgtgccatcttccactatcggcttgcggctgtcgtggctatacgactccttgcgtgcacccacaaactccacttccgtatccttgaacttgacttgtgccgtaccgaagttcttgaaaacagatacatgcgcacctcgtcccagcttctttccgaaagcctgagccatttcaattccgcttcctaccaccactacatctatgtccttggaaggtctgttcaggaaaatatctcttacatatccacctacgacatagcattccagtcccagctcatcggccgtttctgatatcagactaaaaattctgccagcgaagtgttctttcagttccattgtatgcattttttcaatttgccgcaaagttacaaaaaaaatccctttgtccattttttgccgcttgcttgaaatcttgcattcgtttttctggttgtggaaagacattgaggaaacatcaggctgttaagaaacaaacctttctgcatgttttacgtttcgcttgtgcgaaccctatgtttctcaaggccgaaacgtaggtttcccttccgcaaaacgtaggtttccggtgagggaaacatagaaaatgcgtggaaaaaagcaggaatgtgcggaggagttccgaaaatagttgtatttttgcctgcatagaatgatagataaacgtatgaaaaagataggattattgctcgttccgatggcactggcactttctgcttgccagaacggtgagaagcaggctggacagttgtttcagcgtgcggaagctgcgtatgcggcaggtgagtacagtctggctaaattgcagatagatagtattcgtaccctgtatcccaaggcatttgaagtgcgcaaggcgggtatcaaactgatgcagcagattgacctggcagaacagaccaagactttggcttatctggacagcatgatgacggtgaagcaggctgcgcttgactccatcaagggaaagtttgtcctggagaaggacacggcctatcaggaagtaggaaattatttctatcccactcaggtggtcgaaaaaaacatcggccgttcgttcttgcgtgcacaggtgagcgaattaggcgagatgtcgctgacctctatttattgtgcgggagggagtattcatcatacggctgtaaaggtttctgtggatgatacttttgcggaaactcctacgtcaatagatagttatgaaactacagatttaggacgtccggtagaaaaagccgactataaactgggtaatgatggaggggtgattgcatttctggtagccaatcgtgataagaaaaacatccgtctggaatttatcggcgaccggaattataagacagtgatgcatccgaatgacgtgaaggcagtcgcagaactgagtgagctggcacgtgtgttgtctgccatcgaagaaatcaagaaagagcagaaagaggccaacttgaaaatcaagtttgtgaaacggaagatggaagagaatacggaagaataatagaatgcagaattaattgtaaatattgtctgataagacggaaaaagtgaaagccggaaggatacttcgtgtatctgtccggctttttgcttttttgcggatatggttgataattaagtattcaataattagggtaatactaagcttgtcaatcaagcctcattcagcaaattctttaaacggcattcaggaatagtactccagaaccttagagagatgtcttccaatgattgaaaggaaaaattagaatgcgagaatacagaatatgcgagccagaagaacaagatatgtttttttaggaattttgttgccagatacaggtttctggcaactcctttttcggagatatgcatttcttctgcaatctcttttacctttaatcctctttttttacttaaaatgaatgcggttcgttgccgttcaggaagcatgtgaacaagtttgtctatgtacttttttaaatcttcagcttctattccttgttcaatttcatttgaggcttctgttgccagctgtaatgtctcagctagtttttcttcattgatagatttgcggatatggttgaatatcaaatttcttgtgataatgaaaagtaacccgtctaaatctttttcttcgtccagcagttcgcgcttttcccaaagtttaataaatacttgctgtgtaatttcttccttctcgtagttatccatgagatacaggcctgtaaaacgatatacgatgttccaatatcggtcaaaaattgctttaaaggccttggaattcccttgtttaatttgacggatagtattaatcatactgcgaggtcgaaaaaaattattagcgttctttaaatattctatgtgtgcaaatgtagataaataatcttattattgaaaatcttttgaataaaatgaatacgaatgtaaaaaataacaataaagtgatatagctttgtagtcaattctttttatggcgtgtatttatagtaaataaaataagtttaggtgcatgaaccagaaaaaacataaaacagaagatttgggaaattggaaaccttttgtggaacagttacacaaggaatgggaaaaagtaaaaagtgaacaggtggatgagaatctggaacttaaagaaaagacttggaaaagggtagatagaaaaatattctctcctcgtcgttatattttgcgggcaggatgggcggttgctgcagcattagtaggggttatgctttattggggatataagatacctgaaaaacatgaaataaagagtgtggcttatatagagcattcttatgtagaaggccgtatgtatatattgccagatagttcaactgtttggttggaaccagagagtaagatacgaatttcttcagacttcctgagtaaacgtgaagtttggctgacaggaagttctgtcttcgaagtaaaaaagaaagccaatacagatttcaaggtctatatcaatacagcttgtatagaggttaaaggtacagtcttttctgtaaatcaacctacgttagatacttcaattatagccttatatgagggagccattgattttgttggtaaaaaccagtcattaattagtatggcaccttctcaacgtttagtatatgatgtacataccggttctactttggtcgagaattttccagaaaacatacaatgggtagatggaaattatcgttttacggatatccgacttgataatttgatggattttatcagaaaaaaatatcgggtagaggtagaattggataaagctgtaaatcatggcttattgctgactggtactatacgaaatgatgaaagcatggaagctgtgatagaaaaaatatgtttttcttcacaactgacttataagaaaaatggttcccattatttgttgatgaaatagaatttattgctgatatataatagatgtatattccccgtgaaactttgtgtttgtaagtctcacggggattttttatttctacagataaaaatatttttagaaaaaatcttattacccatgtagtctttttttcatgataagtgtatttattacaaaacctaattcttgaatgatggttaactataaattaaacacatgaaaaatgaaaaagagaagtttgttttgtaggagtttgattctttcgctcttgttgtatccttcgtcggatgcttggtctgcaccttttaccgggcagattcctttacggggaaattcaatgtctttgttggaagtggtaagagaaatagaagaaaccactgattattctttcttttataaatccagtgatttggaaggaagtgctaagaaaaactataatctcaacggggatattgaggaagtgctttcagaagtatttgaaggtagtggaattgtatataaagtaaatggaaaagaaattattttaagtaaggcctctgctaaatcggtgaaacagcagcgtactatttctggtgtagtaactgatgctaccgatggttcgacagtgataggtgccaatgtagttgtaaaaggcactactaatggtgttattactgacttggatggtaacttctcacttactttttctgggaaaagttgcaccctggaggttagttatgtaggttataaaaaacaggaagtttatattactgatcagggacttgtaaatgtgaagcttgtaccggataatgaaatgctggctgaggtagtggttgtaggacagggaacacagaagaaagtttctgtaactggatctattgctactgtaaaaggttctactctaaaggttccttcttcttcgctgactagttctttggctggtaagttagctggtattatgtctatgacaagcagtggagaacctggatcttcttctgaattttatatccgtggtatcaatacattcggaggacgttctaccccattgattctgttggatggagtggaaatttcatcctctgacttgaaccgtattccggcagaatctatcgaaagtttttctttgttgaaagatgcttcggcaacggctatttacggtaaccgaggtgcgaatggtgtgatgctggttactacaaaaagtggtacggaaaactcaaaagcgaagataaatgtttctttggaggcatcttacttccgtccgatgaatgtagtggaatttgcagacggaccgacctttatgcgtacttacaatgaagcggctcaggctagaagtctgactcctatcacgaatccgaaatatacggaagaacagattctgaatactgaaaaaggattgaatccgtatgtatacccgaatgtggattggtatgatttgatttttaaggaaggaaactacaatcagcgtgccaatattaatcttcaaggtggtggttctcgtgtgacatattatatgagtttgcaagccaatcatgatactggtttgctggatgcaccgaagaattattattatgataccaacatcaataactgggagtataacttccagaataatatatcttataaggtaaccaatacgactacgattgaccttcgtatgatggcacagattggaaatcgtcaggggcctaactacagtgtgtcggatatgtaccagactgtaatgagagcgaatccagtggcttttcctgcttatttccccagtcaggaaggggatgatggttttattcgcttcggtaatgcagaaataaaaccaaatgtactcggaaagaacccttatgcagaaatgttaggttcatttaaagaaacgaactacaatacactgaatacttctatcagtttaaatcagaaactggactttatcacggaaggattgagtttaaaagctttggtgaacttcaagaactggtcagagtcttcttataatcgttctatcaaaccttattattataaggtaaaagacggtagttatttaccggataccgatgagtacgaacttcaattgttacaaacaggtgatcaatatcttagtcagtcgggaattagccgtaattctgatcagaccttctattttgacgcacgtttggactggaagcgtagttttggcgaccataacttgtcagccatgttgatgtacatgatgcgtgaatacagaaatgatgtgttacctaatagaaaccaggggtattcaggacgcttgacgtacgattttgctaataagtacttgctggaatttaactttggttacaatggctctgaacgtttggcaaaaggagagcgtttcgaattcttcccggctgcttctttggggtgggtagtcagttcagaaaagttctgggaaccaattagtaactatgttagccatttgaaggtgagaacttcttatggtttggtaggtagtgatgagtttaacggaggggctcctcatttcttgtatcaaaataatatcagtataggaagtgctcatgatttctggactggtttgcctactagtgagataaacagaaaaggtcctgccttttatgtattggctgtgcagaatgctggatgggaacatgtcaagaagtttgatattggttttgatatgtcactgtttaaccagttgaatatcacctttgattatttccacgataagcgagacagaatcttgatggcgcgtgcttcctggccttatatgttgggttactggggatcattgccttggagtaatattggagaagtagtgaatcagggatatgaattgagtgtgaactggtctaaacagtttggaaaggactggtctattgatttgcgtggaaactttacctataaccagaacgaatataaatatgtagacgaacctaactatccatatacttggcagactaaaacaggcaagccgctgaatacacttaccgggtatgtcgcagaaggattattcactagccaggaggaaattgatcaatgggcagaccagtctcagctgggctctaacattatgccgggagatatcaagtatcgggatataaacggagatggacagattacgacagaagaccaggtgatgctttctccttacaatggagtgcctcgcatccaatacggtttcggtttgaatatatcatataagaaatttgattttggagtattctttaacggttctgccaaacgtaaaattatgattaatagtggatacactccattccttgccggtggtggtgatggtatcacagtggaaacgctggaaagaaacttgatgcagtggattgcagacgatcactggtcagtagataatccgaatcctaatgcagaatatcctcgtttaggtattactgaagcagatgtttctaataatactcagcctagttcgtattggttaagaaatggaaatttcttgcgctttaagacactggaaattggttatcgtttcccttattgccgtgtatacctgagtggagacaacctggctgtgttcagtccgtttaaattgtgggatccagaattaagttggaatgcttatcctttgcaacgtacttttaacttgggagttcaacttacattttaatgaataatacatgaaactatgaatttgataaaaaatatatataagacagcacggatgatagtaataccttgctgtatgttgactgcctgtaattatctagatgtgattcctcccgcacaggccgattttgaggacaccatgaaagatcaaaatgcagtagaaaactttttgtttacctgttatggctatgtacctcgttgtcagccttatgacttcaatgcttttgaacagtctgcagatgaaattgtagcaccgaaggcttggaatgattttcaacagcaaattgcttggggaacagtttctgcttctacttatatgacttggggaaacggtaagaattttgatgatttcggattctgggtaccggggtataactggataggatatgtacatcattttttaagtttaatagatgaacttcagcctgtgggagttactgaagaggataaggatgaatacaaggctgaatgctggttcttggaggcgtattatcatttccggattcttcaggctatgggcccctgtccgattatcacagaaaaagtggacccgaatataacgaacagccagattccgggtcgttctcactttgattattgtgtagattatattgtacagaagttggatacggctgcaacgattttgcctgctgtcagagaaacggatgatttgggacgtgctacttctaccatttgtaaggctttgaaagcaagagtattgctgtgtgcggcatctcctttgtggaacggttcattcccttatccaaactggaagaatgtaaattttgaaactcctggatatggaatggatctggtaagcactacttatgaccgtagtaagtgggagcgggcgttgacagctgcgcaggaggcattggctgctgcaaaagcggctggttatgagctgttcagtatagaggctgcagatcagatagcagaaaatgatggattaggcttaccttatatacctggaaaagaaacggagacagaggaaaatgaccttttcaagagaagagtacgtatgttccagtatctggtgactgctaatgaaggtcagggcaacaaagaattgatttgggcaaaccgtattgattctgatgtgaataatggaggagaagctacagattctcgtctgccgagtagagtggtgaagaaaagcgatggacaatatgccggtggatggtcgggaatggctcctaccttgtatgcagtgcagcatttctatacagaaaatggcaaattgcctagtcaggatgcgaatttctatccggaatctggttggtatgaacgttttaatgatgccgttcaaagtccggaattggttacagaccgtttggatggagaggatgtgaagaatgatatcataaaattgaatgcaaagcgtgaagctcgtttttatgcttggattgcatttgatggatgtgaatatgcgaagaaaattaatgacggaaactctctttggttgaatttaaagaataccaatacgaatggatggagtcagagtaatactcgtaactgtgcaggaactggatatctgtctaagaaattcattgatcctaacatccgttttggggcaaatggaacaagaactcatcgtgcggctcgacgtccttatatccgtatggctgaattatatttgaatttagctgaatgctatgcggcattggataatacaacggaatcgcttgccaacctgaatgagataagagaaagagcgggcttgaaagaattgacggatgcagatttgactggtgatatgacattgatggactgggttcgtaatgagcgctttgtggaattgtacgaagaaggcttccgctattatgatgtgcgccgctggatgattgctccgactatgttgaaagctggagtcagatacggtttgaatggattagttgaaaatcctagttttgaagagttcaatcagccaaccttgattgatcagccctttaaatgggataaccgtctttacttgatgccgatttggtctagacaaggaatggatgaactgtatagcaatcctcagttagtacaggctccaggttattaatgttttaagaaatgaatctgatgagaaagaatataatttatttggcaggatgtcttatgttgttgagtgcctgcaataactccaagtatgacttggaaaatcttgtgccacaagaatatcataaaattttgtatgtaaataatagtggaaaacaagaaatgacgttatatgatacaggtgaggattacacttataccttgtcggtgattaagacaggaagtgatcctactctgactgcgaatgcacagataaacgtgttaagtcaggaagaagtggatcagttgtatagtaatcctgaagccgtaaactataaggtactttctgaagaaagtttttctttggagactgctgacttggtatttacatctgaagatcattcaaaatcggtaaatgtgtctgttaactcaaccaaggtgaaagcgctgattgaaagtaatccagaagcaaagtgggtattgccgctgagagtgactagtcagactgactctgtgaatgcagcaaagaatgaattgtttcttcagattacaggtgtggtgactccgaatgtgggattctttgttcagagcgaagaagtgaaagagtttctgtttggggaagttccttcgattacggaagaaatagaaatcggactggatacggaaaacaaatgggatttgtcatgtgaattagaaattgaaagtgcagactttatagcggattataatgacgaaaatggaactgttttccagatgatgccggaaggtagctattcttttgatgaattagtttctcttccagcaggaacaacgacttctaagttgaatgtgacaattgatggctctaaatttaccattcctggtgattatatgttgcccgtgaaaataaagagtgtctctcagttcgcggtttctgctacaatgaatgtgtacccaattaagattcgtgttatggcgaaagaactggaccgcacggggtggacaggtacggcaaactcggaggaaactactggtgaaggttctaatggagcagcaaataaagtcttggatggagatttaggtacatattggcattcaatttggcagaacggtagtggacaaagaggacttccgtatgagattgtattggatgcaaaacagaattatacgtttactcagtttgccatggtacagcgtggaggtggatttacagatactggatcgggtgagttctatgttagtacagatggaaatgactggggagaaccggtaggacgcttcacgatgaagcaaaatactgacaagcaagtgtttggtataattccgacgacaggacggtatgtgaaaatcaggatccttagcagttatcgtgatcagaactgttcattgtctgaggtctatgcttacggaaaataaataaaattagggggctgattttgtcggctccctaatttggaatattagtttgagataggttattgttttatgatataaactgtttatgaagcagcttactttattttctttattatttgcaggggtggtacagacatttgcccagcaggcggcagtcaccggccctgattctcgtttgaaactcgattttcagttgcaggacggcaagcctgtctattcggtgacatacgacggaaaaaccgtcttggagaattctcctctcggctttgtatccaatattggcgacttcagccgtcagatgagctttgtcggtcagcaggcagacaaggtggaaaagacgtacacgcaggaccgtatcaagtgttctacggtaaactattctgccaataagctgactgtaacccttgaaaatgcggagaagaagaaactggacatcgtgttccagttgagtaataacgacattgccttccgctacgagatgcctcagtatggcgaaacggcctgtatggtaattgaaaaggaagcgaccggctttgattttccttcgtctaccaccacgttcctttctccacagagtgacccgatgataggctggatgcgtaccaagccgagctacgaggaggaatatgtacccgatgaaccggtggctactccttctaagtacggtgaaggctatactttcccggcactgtttcatgtgggtgacaattgggcgctggtatcggagacaggtgtgcgcagcctgtattgtgcttctcatctgagtgatgctactaaagatggtctttacactattgctttcccaaatccgggcgagatgaacggtctgggttcttctactccgggactggcccttccgggtgcaactccgtggcgtacgattacggtgggcagcggactgaagccgatagtggagactaccgttccgtttgatgtggtggaaccgctgtatgagccttcgcaggaatacaagttcggccgttctacgtggagctggattatgtggcaggaccctagcatcaactacgatgaccagattcgtttcattgaccttgccagtgaaatggggtatgaatatacgctgattgacggaggctgggaaaagaacatcggccgcgaccgcatggaagagctgttcaagtatgctcaccagaagaacgtggatgtattcgtgtggtacaactccaacggttactggaacgacgctccgcaggatgccaagcagtgcatgagcaactcggtagcccgcaagaaagagatgaaatggttgcagaagtgcggcgtgaagggactgaaggtagatttcttcggcagtgacaagcagcagatgatgggcttatacgaagacattctgaccgatgccaatgaatatggcctgatgataatcttccatggctgtaccattccccgcggttgggaacgcatgtatccgaactatgtgggcagtgaggcggtacttgcttctgagaacctgatattcaaccagcacttcgatgacatggaggcttacaatgcctgcctacatccgtttatccgcaataccatcggctgtatggagtttggcggtacactgctgaacaagcgtcacaaccgtacgaacgacggaggtaccatccgcaagacgacggacgtgttccagctggctacggcagtgctgtatcagaacccgattcagaactttgcgctggctccgaacaacctgacagatgcaccggcactggctatcgattttatgaagcaggtacctactacgtgggatgaaacggtgttccttgacggttatcccggcaaatactgtgtactggcccgccgtcatggcgaccgctggtatgtagtgggtgtaaatgcgcagaaagaaccattgaaactaagcctgaacctgccgatgtgggagaaaggcgaaacggtttcctattatctggacgacaagaaacgtcagccgcagctggaggaactgaaaatcaagaatccggtagaggtgaaagtggtactccaaccggatggaggaataatattggttaa

SEQ ID NO: 3771 - DNA, 45114 bp, Unknown
  gut microbiota DNA sequence
tacgcaccacatagtctgctccctcgatggctgcttccggcagtccgtcgccttcggtacccatcaccagggccagtcgtagttcctccttcagcggcggataatccagtggtacggaacggtcggtcagcgccatggctgccgtacggaaacctaattctttcaatcgctccagcggacggtctacccacgtccagggcaccagaaacaccgaccccatcgacacgcgtaccgcccgacggttcagcggatcgcacgaatccgtggtcaacagtacggcatcgatacccagtgcggctgccgaacggaagatggccccgatgttggtggtatccaccaccccatgaataaccactaccctgcgtgctccacggcatacttcttccaccggacgcggagccggacgccgcatggcacacagcacaccccgcgtcagcgtataaccggtgagtcgggccaacagttcccggtcgcccgtatagaccggcagatgcgccatgcgctgcacaatgtcctccgcatcgcccgtaagatgcttccgctcacagagcaaggacacgggttcatagccggcctccagcgccacccgaatcactttcgggctttcggcgataaagatgccccgctgcgggtcaatgcggttgcgcaactgggcttcggtcagggtgctgaacacttccactccgggatgctccagcgaggtgatttcgataacgggcataacgtagacttttttgaatgaaccgcaaagttacgacatctgccgcacattccaagaatcaccccacgggaaaatcaggtatcccattcactcggctgccgtatcgagcaacggagcttcctcttcctccggtccacgaggtcccagccccggtctctcaccttccggcatcggaggcaatacctgcggctgcggtttcacggtctgccaggtggcatactgttcttcggtgagaatcttacggattttcttctcccgcttttcctgctccttctgcatcttctcggcatgctccttcatccgttcttccggactcatgccttccggaaatcctcccattccggggaatcctccaccctgcggtggcattccacctcccatcggagggcgtcctccccccatcgggggccttccagccatgggaggcagtccgttcattcctcccgggtgacgctgcatcatggcttccactttttccttttcttccttcaggaacaacttgtaaatcttcttgtactgcttctccgtcaggttcagtgccttatccatctcgtcggtccgtcgctgagccgccttctccggattgggcacttccttcttctgcactttctcctgcgggtcatcgtagcggacgttcgcacttgcactcaaaggtgcacacatcaaggccattccgcaggccatccacacaattttcttcatcttacttacaatttaaatgaaaactaatcggaaacaaatgtagaagtcacctgcaattttaaaaaatagaatccaccaaatgcggttttctgtctaccaattggaaagaaatctcgtatctttgccctctgtttaaccaatcacacacgcttttatggaaaaagaaacaataccaacctgtgtggactgcggcacacagaactgcaaatacaaggaccgcacctatcctgatttctgtcccacggaaaatctgaaggaggaagaccgccagtgggcactggagcgttacgacgagggacgcaaccgcgagattatgattgccagtgcggaagtagaatacgaaggctactgccagtggacccgcgtgcaggaaatcatggaatttgcccggaaaatcggtgcgcaccgcatcggcattgccaactgcatcggcctcatccgtgaagcccgtatctttgcccgtatcctccgtgccaacggcttcgaggcttactcggtcatctgcaaggtagccggtcagcccaaaacgtcgatgggtatccccgcacaatgtgaaagcatcggtgccgccatgtgcaacccgattctgcaagcccgtctgctgaacgaagcacataccgacctgaacgtggtcatcggtctctgcgtggggcacgacagcctgttctacaaatactcggatgcctacgtcaccaccctcgtgaccaaggaccgtgtgacgggtaataacccgacagtagtactgtatacggcggattcttattaccggaagaagttttttggagggaaataaaagactctgactaatggtatataaaaaagggaagcagcacatcgatacgccgcttccccttttttataatattctatttcaatcacgcaacaatccaccgctcaatgcttcgtgtctcgtcactgaagtttactcccacctttatcaccttccggctatcggaagcaaaggcagaggcatagcccttctcctctatctgctgcatggcttcttcagcggtaccgttcaacttaaactccatcacgtagatgtaattggatgtcttgagcactaaatctacccgaccacgcgatgtgcggtattccacctcggtgtggaagcccatcagcttgaacacgatgtaaagaatgttctggtaatgtacctcacgatcacgggccagttcataaggagtatcatcgaagaaagtctgcaaacgactcaggaaaccatccacatcacccttgcgaacctcacccacaaagcactggatttcataaggagacttgctgatgcttacagacgcatagtgaggaagcaagaaacggagaaacccctgctccacctcacggttcgggaaaccgagggtatagttctcaaactccgcgttatagtccttgatggtcagataaccgctttgatagatgaccggtaccggatcggtagaagccgcatcgatggaatccagcaccggaccgctggttacgatgtgttcaatctcttccaccggataatgatgaagtttcatcagttctaccaggtaagtcggggtacccgtctcaaaccaatagctgcctatctgtttcttagcaaaggtattcagcaggctgaaaggattgtacatgcctaccgacttatagcagaaatgataaccgtcgtagttttccttcagcagttcacaagctttggcataatccacgtccagtgcatcggcaagggcatgaatgtcctcgtcaaaatactgatgaagttcagcatcactgataccgcagagttcagcatagcgattgtccatggagatgtccatcaggttattcaaatcactgaacacactcaccttgctgaacttcgtcacgcccgtcagcatagcaaaatgaatggagccgtcgcacgacttgagcgcgccatagaatgctttgagcgtattacggaattttgtctgcagttccggattcgtgatggcctgaagcatgggcttgtcgtactcatctatcagaatcaccaccttttgtcccattttcttcgcagcccgacgaataactccttcgaaacgggtcgccacggaatactcatccgggttatggccatactctgcttcccactgcttcagcgtcagttccagcttgttttccagacttgcttccgtatcatacttttccgtattcaaatccatgtgaagcaccggatgcaccgtccaatccttttccagactttccatggcaagccctttgaacagctcacgctttcccaggaaataagcctccaatgtagaaatcatcagactcttaccgaaccgtcggggacggctcaggaaataatacttccctgtctgtaccagattatataaaagcaaagtcttgtctacataaatatatcccctgctgcggagatcttcgaaattctgtatgcctaccggataaagtctgttcatggccgtatcgttttaatcctttcgtacacacaaaggtaagatttatctgccgcaattcctaatctggcaggctgaaatcaaggcggcaatagattccggatgagatttatagtcccaaacaaaaaattccttacctttggactaaacaacataatatgccataaaacttaaactctatagtatatgaaagccaaacacatcgcattcctttcactcagtgtgcttgcaggaacatttgcctcatgcaccggctcacacgaaataaagattacaggctcggtaaaaaatttagacggaggcacaattatctatcagaaatccatcgacggaatgtttaattcgcaatctcaggatacactgaagctgaatacggacagcacgttcagtctcacactccccagcaacggatacgaacagatacgcctgttcctgtggggaaagcgttatttaggttccttcattgctgacggcggtaactatcgcctgcaaattgatgccgcagccacgcatcccatctccattctggaaggcaagaatgaaaaaaacatggaggtatcaagactaatggatgaactgggccaagacgtgtttgatgtgctttcaagaaaaggcgacaagtggggtattacccaagataccatagctacttcagtcagcaaaaagttgcaagatgcggtattagccttagatgagaagatgaaaggtgtggatgaggatttatatgaaaaagcctgccaaaatacacgcatacagacgatgtgggccttccagaaccagcttttcggcattgcctaccgctattctgaagccaccaagcaaagctggctcaaggaatgggaaaagatgatggaattctgtcggataaatcacccggccagcactttctcgcccgctttccatgaagtagtctataacaatgccggcattacttactacactaaaaaagaaccggtagacgaagacttgaagaaaaatcccaataagttgattttctattacattgaaaagaaccttacgggtcaggcacaggaatcggccatggcactgcttttcctgagggacgcaaacgaggaaaaatacgacccagaaatacttccgctggaagaacgattcaagcaactgtatccacatagcaaatggcagccgctgataaatgaggccattgccaagaacaaggcgttcaatcaagctaaaatacccgactacatccacttccctaatatagacaacgccaagacattcaaagacattaccgacttatataaaggaaaggttattttcatggatatatgggcaacttggtgcggtccctgtcgtgcttctttcgcctatgtaaaacctttacaggagtatgccaaagcgaacgacatcgtactgctgtatctctccatcgaccgcctggaagaagatgccaaatggcgcaagatggcatcacattatgacctgatgggcgagcatgtacgcgtgcaggaagcgtttaaggatgaaatatacacaaccttcggcaacgcacaaaaagcactttccattcctcgttgcgtgattatcgggaaggatggagaaatcaaattcaaatcggcagcttctccagaagatatggaaaaactaaaatctcaattgaaagaggcagcgcagacaggagcataacccctattgctactgaaactcctaatgcatagaaaaagaggctgtctcaaaatgtactgcaccccaaaagttttgtgtctaacttttggggtgcagtacattttgagacagcctcctatattttacttcaatgctttcccatcggagaaggcattacccaccttctctcctatcaccagatagtgatgatgaatcgggtcatacgtaatcggtttcagacgggcagggtcaatctgtccgttttcatccaaaatctcttctgctgccgacacgttgacaatacggcctaccagatgattgctctcctgatcgtatgaaaccagctcacattccagtgtcatgagtagttcctcaatgaccggcgcattcacaaactccgattttacggcatggaaaccggctttggcaaatttatccggctctttctttcccgagacaagccctacataatcgcaggctgccacatggtcggctgtagccatgctcacggtaaaggctttcgtgcccagaatattctgggtcgtcttgtgtccttcggccaggcagatgcccaccatgtcatccgtatagattcctccccacgccgcattcatggcgttggggtttccattctcgtcgtacgctgccacaataaatacgggcatcgggtacaaccatgtttttactccaaaattctttcgcatagtctgtatattttaaaacaacatttattcagattctcattattcccataatttctgccagcaattttctgaatcatgatccaaactgcaaacgtaggcagaatgtaatggcgtttctgactctccttcccctttcaaccacttcagtttcaagtttacagtacaattatccgataattcttttgtccttttccaatcgttgaggtaccattcattactagtaagaatcaagtcagctacttcctgtcgcgaaaggataaagtaataaaattccatatcaagcccttcgccgataacctgaacgaatacccatggtcctttaatcttttccaacaaggtatccaccttctgaatcgtacatcctacattaaaattaggattctgccccagttgagtcttgacctgaacaagggatatttcatctgtttcgggatttatgcacaccaaatctatggattcaaaattcgtaatagaagcattagcattcaacacattccatccctgttgcatcaatttcactgaaaccatctgttctccaatggctcctattaaagatttcttcataattccttttcagattctcagtacaaatacctgtcccgcaaatattctttccactttctgtctttctcgcaagagaaaaacacataatgtcccattgcttcaaacagtcgctcataagtaagaggaagaaaggtgctctggcctttctctgtcaacaaacgctcgtattcaggaagcaccttctcatagtgtttgttcccggaaggatacaaatgcaccgacaagaaatgttggatgtctgaatgctgtagcatcgacatgccaagcatgtgattacgccacaactgacggtaatcatcttctatcagaatctttggaaaagcctcttcgtcagtagcagccaaaaccgtatgatagcatccgctctgaagagtaacacgaaggtattcttcgcttaatttttctcgagtatgtttgtattcagacgagccaaactgcaacttataagccatttccgtgtattttacttctataccgattccacagaaagcatccgaattatccttgtacgcaatataacagtcaaacgaggtaccgtcattcaaatagcgccatccatctgtagtgtctgcagaagaaggagcatattcaacccggatacaggtcacctccttcacttccagccctgtcagttccctcaagagttcaccacacgcttctttcgcacgagaagtaagtcccatcgggaaaaacaagttccacggaatatgttcactacggagtaagttagcccataacggctgtctgtacgcccctatggcagacaagatttctttccggaaaccttcgtagaaattcaatcctttccgggcatccttttcctgaagcacattgccataatagttcttcgtaccatcctgcctgttcaatgaattggcctcacatcccacctgcaaacaattccgacggaaatcagattgtttggtccgagcaatacgctgccagtccgtgtctcctgcataaagctcgactttttcagttatcgccaccttaatcaccccatccagacgattctcgaaaatgcggtaagcttcttctatctcattaagcgggaagcggtgtgtaatgagtggcgtagtgtcaatctttccttctgctatcagccggagaatttcggcacaatcgcaaccgtctaccccgcctgtcttgaaggtaaggttcttgccgtacatgtcgggcaagggaagcacctgcggacgatcgtacaaagccacgacggtcacaatggcattcggacgagcgcactcccaagccagctggaaggtatcatcggctccggccacttcaatgactacatcggctcctccatgcgcgctgtgagctttcacaaactcctgacactgttccggcgtagtgaccagtacctcgggataatgggtctgcacgaaacggatacgctcttctgatttctcacatacaatgagacgacgcggatgtttcagccgggcacagagcaacgtacagattcctgtaggtccggctccaatcagcagcaccgtatcttcgggcgtaatttccgagatacgggcagcccaaaagccagtggccaggatgtcgcccacgaaaagtgcctgctcgtccgtcactccgtcgggaatacggttcagtccttggtcagcatgcggtacccgcacgtattccgcttgtcccccatcgatacggcaacccagtgcccatcctccgtcggggtcctcacaattgtttacatatccgtgctgacagaaaaaacattccccacagaaggtctccacgttgaccgtcacccggtcacccggcttcacggtagtgacctccgctcctacttgttccacgatgcccaccatctcatgccccaccgtaatacccggtacagcacgcggcacactgccgtgcttgatgtgtaaatcgctggtgcagatacttcccaacgtgacgcgcaccagggcgtctttcgggtctttcagttcgggcacaggcttctctatcagtgagaaacggccgtgctccatatacgtataagctaacatattcttctgtattaatcgattacttctatcaggaaactcaccggacggaaaccgtcgttgcacgaaatcatagccgaacgttcgttcttcatccagccgtcataaaaattgcttcccccatgagccagtgccatcacgaaaggcgacatgctctgccatgcactctcacaaagtccctcaggcttctcccagccattagcaatgaacacctgcccttcttccatgtcacacgcatgttcgatgggattctcatacttctccattaaatcccggtaacacgcctttcgcattacggttattcggattttcttcatgccttttcctcctttcactcataaaaatacgccttcagcacttctccgaacacctctcccggtgcaatcttatcaaacagcttcatcgaagtatgcagtttcaatacatccacctccgaccccatcagttcccgcaccgtacgatggccacgatgacctaacaaggcatgggagatttcccgcaggcggacacccaatacaggatgtgccagataagcccgggcctcttcttccccgtccagtccataaaactccgagttgtaactatagcccagccccttctgctgagggaagatataccaaatccaatggctgcgcttacctccatttctgatttccttcaatgccacaggatacacgccttcctgcgcatccagaaaccgttgcagattaaacttcgtgtgcgacatattccttcattttttatctttactcaaatgtaaggataatcccttaatgagccaacggtcgcgaggagaattatttttgccacaagaacgattttcctccctaattcttcgttaattaaagagttatgcttatatttgttccgaaaatgcgcacaaggcggttttcatcgcacattgatttagatacaacaaatgatcgttaaagatgtcacacacaaagttttcgttacgttccgctgaggtcctgaccggatttttctcagcataggaatcgaatgaattattgcttccgacaaggaggccgggattgttgtgctctttgacgtactagccgcgcacctctctttcgatggggaaacgagagggaatttacgctgctacggaccttcagtgtccgtaagcttctatctttatctatttctattttctcattttaaaattcgtttgttgtatatgaaaaatgttatgttacgtgctacacgcacctttattgaagatctctgtgctcccgaatatgctcacaaccacctcgccgtggaaatctctcatcccgatggttttaccgatgcccaggaactttctatccgggtgtattcctgcgaataccgcctgttgggctgtgatacccgttcactgaaagggaaaaagtcccgaaaagtacggttcgacatcctctctgaagaagaatgggaagccggactctaccgtatctatgtctaccgcaacggacgcccggtgggatggacactcttagaactctattccggctacgaatgctgggacaagaccgaggtggaggatttccagacccgccctgaagaaaaatactttgccgagaccttctgtttcctgcccttgttctcctggatgcaccaggaacaatgtgactcgaacctcatccggcagttcctcgaaacattgtatgcgctcgacagccatcagcttgccgtacctcacctgcttgtttcaggcaatcaggctcgcaaatatgccgcccgcctgctggcccttcatttttgtgaaaagcaaaccgctctttgcaaccatttctccctacaagaattgctggaggattccctgcaatggaaagtcctacaagagaagatggacacccgaaaagtggtgctggtggaagtgccctacaaggagtacacccgacaggaatccaacctgctcgacctgttaggaaacctgatggaacagaaagtttcttctggccctatcttcatcttctacggcacaatggacagtacctatcagttgcgcagatgcagcacagcaatgagccgcatctttacggaagagaacaccatctatacacccgacaaggcggaaaccgatgacccaagcgaagcctttccggtagatgatcttcctttaccgtttgatgaagaacagccgcttccgcataccgaagaagatagtcccctgcccgaagacaacatgccatcggatgccgaacaagccctgcaggagatggtaggactgacccgcctgaaggaagacttgcaggaggcccggatgatggccgccttcatgaagcggcgtatggaattagggctcgacacggaactggacaaccgccaccacatgctgttcttaggcaatcccggtacaggaaagacgacggtggccaaactcatcggacagctgtatcaccagatggggctgctttccagcggacataccatagaaacatgccgcacaaaactggtgggcgaatacattggtgaaacagaaaaacacatcaggcaagccattgaggaagcccggggaggcgtactcttcatcgacgaagcctacaccctgattaccacgaaacaagaaacgaaagatttcgggaaagaggtgattcacgccctgctcactgtgctctcagaacccaatcccgacatgattatcatcctggctggctacgaggacaagatgcagcagatgctccgtaccaaccccggcttgcaggaacgtttccctctccagttctactttgacgattacaatgcggacgagctgatggaaatggcacaccgtctcttgcagaaacgcaatttccaactgacttccgaagcggacaaggaactgtataccctgattgtggaagccaccgcccagcgcgatgagtatttcggcaacggacgctggctgcacaacctgattgagcagggtatcatcaaatgcatggcccagcgtatcatgtcgcaaccttctattcccgacaataccttcctgttccgtactatcacccaggaagatgtcgtaaaggcaggtaatcgtctccgcggcaagcaggtagtgaaactggaaccgcagcccatccgtcgcattggattcagggcctgaaaaacaaacctgacttctttatcgaaataaataagagtccccctgctttcgctgcaatgtgaagcagagggactcttttatttcccatatcctctcatttattaaacactaacttgtccgtgtcatacccgcgctggcgcaacttacctatcaattcctgaagtacttcgtcgggcagggtttcttcgcggctcataatccagagatacttatcgctgctactgcctatcagcacgtagcgatagtccgggtcaatatcgagcacgtaataatcggcatagaaccacaggaagaacgaaactttcaacttgccggggtcgttcggatcgggctgtttggcctttcccttgatttccttatactttccatctttgtatcccgcattcagcacctcaatgcgtccgttggaaagcaaggtatatgtggccgttacacgggtcatgcccttttcaaagcggtggtcataacgggctatttcgtgccacttccccataaaacgcggtacgtcgaacgtctgtaccgtccggttgtctatctcagtgctgttaccactctggcaactgcccaggcccagcagggcacacaaaagaatcaggatgtgtttcatatatcttctatatttaaataaacaatgcctccaacaaatatactgaaaattataccacttatctcttgtcgttcaaaaaaataagagccgactattaccggttttacaaataatgcctatctttatccacagtcaaatcattttcaaaagacatcacacacaataaaactgaaatctatgataaacacaccatctcttacctgtttctgtacggcactgctaatttctgtcagtctttcagcgcaagtttcacaaaaaggcaacgtacgcattttcaactcacaacatacccccttgcccggagtacaactaatggccatcggtgcacctgctactgatacagacaataatggggaattttgctttcattttctgaatcacaaagcaggcacagctatcagttctccacaagcctacaagaaagggtacgaagtcgtcaacagcgacatgctcaacggctggattctttcagagaagcgttcattggacattgtcatggccccggaaggtaccatcgaagaacaaaagaatcactactacgccattgccatagcacatttttccaagcttcgcaataagacagtacaggaaatcaaccatttgtacgcccagcagaaaattacgcaagcagaaagagcccaacgactgaaagaactggcagaagaaaaccacactttcatgaacatgctggacaagtatgccgagaaatttgcccgaatcaaccccgacgatataacccaaatagagaaacaagtgctgaaactggtagaggatggcaaactgacagaggcaatagaattatataacaattccggcttgattgttcaggcccgccaaaagctacagcaacgcacacaagccgatgaagacattgatttgctggcagaacgcatgtatcgctacgccgacctgtgtgcactggccggaggaaaggaaaatgagcagaaagcttatgacacctacaagtggattgcagaaatattgcccgaccgattttcctacgtcctaaaatacgtcctacaaaaaatcaccttaggagaacaagacctggaagaatgggcagaccgctgtcagaaactggcattcgatgaaaaatcgcttattcaggttcttaatctgaagacactcattgccaccaatatccgaaaagactactccaaggccttcgaatacaaccagcaggcactcgaaatcctgcaacaggcacaagaagccatgccatcgggcgactatctggccgtcatgcaaatcacgcttcaccagacggcctacctgctcgaagccatacatgaatggaaacaggcagaagaggtatatttgagcaatatcaaaaaccttgaagaacaaatagccgttagtgacaatcagctgtttatccggatacagaaaggttctcttctagattcctatacttcactgatgaggctttattcccaaaaggaagatttggagaaggcccgtcagactgcagcaaaaatcaaagaaatcagcctcaacgaccccgaccttgacgaggaaaagagaatttccatcgaactgaactacctggatatgctactggattttgctatgaatgccggtcaaatgaaagatgcttataaaatagctgctgaggcatacacaaaagcagaagtactttaccagaaaaatccgattaccaaagcagctgagttcctgcaacgatacatcgtctacctgcaactgagtgtagattccgaaaccgacgcattcccagaaagagcagaacttttgagaacgagaatcgaacaagagttcacttctctttcacccgattttaaaatcaacgccttgcacaatctggagatgatgtattccacttattattcgcgaaaaggcaaccagccagaagaacggcgcagcctggtcaaagcctaccaatacaccaagaaactaagtgaatccagcagttcccagtttacccaggaaaatctttatgcacgagccaaatacattgatgtactgattgcagaatctaaaaaccaggaagccgcccaggaagctcttgaactcgatgccctctattccatacaatcggcctggggataccaaaacctgagtgtagaaagcagcatgggagtcgcactggtatgcggcggatattatgaactcggattgaaatacctggaacgcgtaaaagaaggacgggaaaaggaactgaagaaatatccccacaacaacgaactcaaagcaaatacatgcagcacctacaacaacctttccctgggttatagcaaactgaaaaaatacaagcaggcactgaaggaacaactaaaagcctacacactgatgaaagacctatatgcacaaaacaaagcacagttaggaacgaactacatgctcatcacgatgaacgtcagtgtgaactactatcagaatggcgataaccagcaggccctgcactacctggaagaagcttccgccatagccgaggagatgaaagcactatttccgcagtatttcgccacctaccctattgtcgtcaagctggccaagggcgatttgctcagcaaactttcacaaccgggagcacaggaactgctgaaggaagggctggaatacaaggcaggctcccagccgaatgatgccctactgctgtacaccctgaaagaataccacagcaacgggctctataccaagtaacttttatttgcgaagaatgattttccatgggattttatcggacaccggaccggtgaaatcccataattcatatcctttcttgaaggcctgtacccgctgctgcacctgctgtttgtccagaggaaccgacaaacggaaatttcccatttcatccgaaacagtctgtaagtcgatcacctgtatggtcacgcctgacagcggacggttcgcttcatccttcacggtgccgaacactactgaaagactcttgtcgcgacgtatgtttaccaccagtctcttttccagttccatcaccgtgtccactggttcatatcctttagcagtgactgaaagctgcaccggagtacccagataacgggaatgtatctccttgaaaatcgcttcatcggtcagtcggtccacgtggcaggtctcgctcttgtcggaataagtcagcgtaatgtccgccccctcaaatggaagtgcggaaactgtctgatcgctcaggcaaaccgtcgtagttactggggtaaaatagaagaaagccttaaatgccagccacatcacaatcagcggagctactacatacgacaaggtaaacttcagtctatacagcattttctcctcggttgatggagcacgaattactccttcctgctccaatatagccaactgacggtcaaatttaacccgccagtcttccggtgtagtgtacacatcgcagaagtgtcccagtgtatgctcacagtattgcttgaaattggtaagcgcctcatcctcaatgccttcttccttaaaataaatgaagatttgcggacgttctttattctcccggaaagcagccaaagccacttccaactcttcacgcgtatattttcccaggcgtgtgtgaaacaagaaaatcaccaggtcgcattcacggatgtacgcattgtagcggtcctgcaggcgaccgtcgttcagcgaactgcagaaatccttccaagtacggtggtcaaactcaatatcctttttccggtacagcttgttcttgtccgaaaaatacacatcaaacatcgttttgtcctgatccaactcagccgacgatgcaataaaaacctttaccagcttacttctcatttttccaactattttctttgattcgagcccagttacgacgagctagaatccgttcttccagtaatttcagtttctcctttattttcttaggccacttcacatcctgccaacaacgttgcaggctgacctctatttgttccacctcggccaccgtctgcgcttccttgactagcaggccatatcggtcgatagcagcctctttctttccactgttccacatccactccgtcacggtcagtcgtggagccatctcccgtgttgcttccaaaatcaagcgggccaccgaatcacagcccgccacatcgcccgtctgccgcatcagttcaaaactgtgcaccaatgaaggcagcaaaagctgcacatccgcatcggcagcctgccttccggccacacgctgtgccagcactgaatccgtatgcatggactcatacaagcggatagctccttccatatcacccttatccagcaactccagcgcctgctgctctgttcgttccagttcatcacggttcaggcgggcaaacctcatggcatatacctccagtcttcgcttcaaggtcacttgcacctgcgacaaagaatccaccctccggacatactcctcgtcagtgagccgttgcagtttccggcgagtctccagttccaccagcgctgcatgatattcccgctcactagcagagacacctatctgataatattttttccgcagtgcatcaatcatttccgtacgccccaaaacgattttcagcaccgcatccgacgaaaggttccaattgtccaccttctcccggtttaccatttcaaaacctttcttatataccccgtccagcagcaacgggtcgcctggaaaagaagaaacaaatgacaagacgaactgcccctcctggtcactgtcggacgaagccgcaccggtcgccctgatttccacccctgccagcggacggtttccactgttcatttccagcaccaccccccgctgcacaacctgcgcttcggcaaaaggaaaaagcatccctccgcacaaacagattatccatctttgtataactgccctcatttcggtcttcaaatttacagttcgtctgttgcaaatttaggaaattctctgagaaatacgactttactgcatatttctcttccatttcatgtttaataactaaaaaccgtccccaaaatttggaaatcataccttttatcaataactccatcccttcccaattacagagacatttatcaaaaataaatcccttaatcgttaggtcagctacacaagaatacctacctttaagaccgttattttttaccaggcaatctatcagaaaaatatgaaaaagacaaaactattttttgtaggtgctgccatcctgataggaggagggacggccgtacatgcccagtcgtggagaaacgacggggcagtttctttggataaacaatatgccgattatccttgtgtgaatttactagacagtaccagtgtgacggtggaacccaccggacaaggttcgtttgcggtctgccgggctgtacgggtgcagacaactgccggagccttgcagcaacggatactgaaatacgattacgacccgctgacggcagctgctactttcaagcgagtgaccatctaccatgccgacggaacttatacatcggtcgatgtgagcaaggcgtgcgactacgccgctccggccagagctatctactggggagcccgccagattatgctggaactgggggcattgcaaccgggcgacatcatcgactatgaaatcgacaagaaaggattcacgtatgccctgctgagtgatgcaccccagtcaggcgacgactcccgctttatcccgcccatgcgcggacagttctacgacatcgtgcccttttggtcggccgatcccaccctgcgcaaagtgtaccgcgtcagtctgccggccgaaaaagaaatgcaattccagttctatcagggcagctgcgcttcctccatgcgctacgaagacggacggaaagtctatacctttgctaaagatgccatcctacccttccgtcgggaaccaaatatggtcgatttctatgacgccgcaccgaagctgatgatgtctaccaccgccgactggaaagagaagtcacgctggttctacggagtcaacgaagactacggcagtttcaccgccattccggaagcccagaagaaagtagacgaactcattcggggtaaaaaaaacgaactggaaaaagtggcggtactcacccactgggtggccgacaacatccgttatgcaggtatctccatgggaaagggagaaggattcaccctgcacaacctgaagatgaattataccgaccgctgcggggtgtgcaaggacattgccggcacactgattgcgttcctgcggatggcaggattcgaagcctttccggccatgaccatggcaggcagccgggtggagaccattccggccgaccatttcaaccactgcgtggccgtagtgaaactcagtgacggcacaatgatgccgctcgaccccacgtgggtacctttctgccgggaactgtggagcagtgccgaacagcagcaaaattacctgccgggcacaccggaaggcaccgacctgtgcctgactcctatctccgacccggaaaaccattacgtacgtatcaaggcacagaacaccctcgatgaaaaaggcacgttgaaaggtaccttcaccatcgaagctgagggacagagcgacagcaacatccgccgcatcttcaccaccggatttcagagcgaatgggcacataccatggaacgccagttgctgaacgtatcgcccaaagcccgattgaaaagcgtggactacggacggacaccgaaagactaccagcgcgcccctatccagattacgttccgctacgagattccggaatatgcactgaaaggcgaccagggagaaatggttttcaaacctttcgtactgaataacctctacacgcaagtcctctcctacctgcggatagataccagcctggagaaacgggcctacggcttcaaggacggctgctcccgtctggtggaaatggaagaaaacctgaaacttcctgcaggatacgaatggcaaggaaaggaaaagcaggaccagatggacgggccaggtgccggattcaccggatacatgggccaaaacggcaaccagttgcaggtgaaaacatccttgcgcctgaagaagcgggtctacgaagcatccgactgggaaagtttccgaaatgcggtgaacacagccaagggatatggagaatacattgtggtaaagaaataaccactcatacgaggatttaacaagaaacgaagcgtaatgaaaacattatcaatctacataggaatcataggaatgcttttgctggctgtactgccggccagagccgcatcggaagcagaattccgcaaactctcgaaagcgtacaccctgcgtgccgacggcagtcaggagatgcgggtgcagaaggaactcaccctgttcacccatgccgccatgaacggcctgtacggagaaacatttatcgtgtataaccccgacttccagaagctggagattcacgcgtcctacacccgccagaaagatggcaccgtggttcagacacccgccaatgccttcgtagaggtattgcctgccgcagctgccaacgcaccggcctacaaccaactgaaagaaatggtcgtggtgcacaccggacttgaattaggtgccaccatcgtgctggattactccattgtaagcaaagccggttacctgccggaacttgatgtctgctgtccggtcaaagaactttctcccatcaaggaattcaccttccgcctgaacgtaccagccggaaaatcggtacactatgaactgctgaacgcttctgcccagccgtccattgcccaaagagacggaatgaaatccttcacctggacactaaaggaagtgaagccccgcccttacgcctatccttccacaagaggaaatatgggacaagtacaagcagtagccagcggcatgatgcccgtcttcgtggcctcaacctggtcacgatacgatgaagccctgaaaagcctgaaagcacaattccagcccggcaaccgctccgttatcgaagcaaaggtagccgaactaacccgaggcatccaagacaatccacaggcagtccgcaacgccatcgcccactacatgaccgaactgtatcaattgggccgttgcggtgtatcactgcaggatgccggctaccgtctccgtccggcatcggaagttatccgttcggcttacggcacacaggcagaattagcgaacctggatgtcaccctgcagcaggcagccggactggaagcggaagtagccgtatgtgctttgcgtccgtcgaaggctgaaaaccaaggtttgtctaccatcgtatcgctggtagcccagagcaagttgatgcccgaaaaggtcgccctgacaggcaccgaagaagccagcctgcaacccttcctgacggtgatcagtctggatggaaaaccgctaacaatggaagcttacttaggagccaaggaaatgcagcagaccgacaccctgagagtggacgaaaagaagttgcagcagcctgccgaaggatggggaatcgtgacactgaacgacccgacaccggcccgcacgctctatgcgtatgccgccaatacaaccattcccgagaatatccttctgccgcgaactatgaactgcacgctggagaccattgtctgcctgccggaaggaatgaaagcaacttctcgcaccaacaaggaaatcagcaatgcctgcggaaaagtagtattcagctaccagcccacgaaagaaggcatgaaagtgacccgtagcctgcgcatcagccgccagctgcaaactccatcgaattacaaagagctgtatgccctcctggcagaatggagagataccaataaccatacgctggtggtgaagaaagtagcagaataaactgaaaaataactctcacgaaaaaggaatcgccccttaaatggatcggttccttttctttttccccgaagccgctaccacactcaacaacatttccggccaacttttccgtttcctgtttcctgcctgtttgaatgttcgctgaaaattactacattcgcagtagaatctaaatccagtggttatgagcaagctatatccggtaggagtgcagaactttgagaaagtgatattgggtggttatgaatacgtcgataagaccgccttgatttatcagttgttcaatacaggaagttactattttctgagtcgtccgcgacgcttcggaaaaagcctgctattgtcgacccttgaagcctatgcacaaggaaagaaagagcttttcaaaggactggcactggagaagctggagaaggactggacagtatatccggttctgcacctggatttgaatacgcagaaatacgatacgccggaatcgctgaccagtattttgaatgacaatctatgtacctgggaaagtcgatacggcgcacgggaaagcgagacaagcctttcccttcgtttccagggtatcatccgccgtgcctgcgaacagacaggccgccgtgtggtgattctcatcgatgaatatgacaagcccatgctacaggccatcggcaatgaagccttgcagaacgaataccgaagtaccctgaaagctttctacggagcattaaaatccatggacggctgtatccgctttgccctgctcacgggagtaaccaagttcggcaaggtcagcgtgttcagcgatttgaataacctgatggacatctccatggacgaccgctacgtggaaatctgcggcatcagcgagaaggaaatccatacgtattttgaggaagacattcatgcgctggctacagctacgggccagacttatgaagagacttgtgcggagctgaaatccaattatgacggttatcacttcacggaaaatgccgtgggcatgtacaatccgttcagtctgctcaatacgtttgcgaagaaaaagttcggcagctactggtttgagacaggcacaccgacctacctcgtcgaactgctcaagctccatcactatccgatagaagaactggaacacatcgtcaccagtcagcctgtactggacagcattgatacggcctcaaccgacccgatcccggttatctaccagagcggctacctcaccatcaagggttacaacaagatgttcgagaactacacgttaggcttccccaaccgggaagtggaacaagggttcttcaagtttctgctacccaactacgcatcggtaagcgtaagcaagtcaccctaccagattcagtgctttgtggaggaagtaatggcgggcaaagtggatgattttttcgaacggttgaagactatgtttgccgacattccatacgagctggcacgtgaccgcgaagtgcattaccagaatatcctctacatcattttcaagctgatgggcttctacgtgcaggtggaataccacaccagtcgcggacggattgacctggtactccagacgcaggactacgtgtacatcatggaattcaagttgaacggcagcgcagacgaagctttggctcagattcgggagaaaggctatgccgcaccttttgccaaggacagccgtacggtctacaagattggagtaaacttcagtgatgagcttcggaacattcaggaagtgaaggtggaaatggagtcttgaccattgtgtcagtttttttcaatggcataagaaactacaaccgcttttacacctgcatccgggtatttgctcttatagtgtgctgtcaggtccttatacagatagaaaagatttgatgttactcctgcttctcttgatttcgcagaatatcctaaaaacacatcaaacgaaggatagcctgtttcattcccttcttcatccaggaatgaccattccatgaaaccatttacttgtccttcgggtggtagtatctgatatacttcaggaaattcttcctgagctttattggttctttttatcagaccaggacctaatacattagtgtcatcttttattgcgagccatttcggtccttcactgttgccataatagaaatagtgatagtccaatggcagaatagagttattcttcaaatcctcttcaattacctctttgttatcaacctctaccgcatatctgtatttaggcaggaatttgtctttatagaatgcttccggaataaagtgtttcggtaatccctccgaagcttttttctctttggagattacctcaagcaactcatgttctgtccaagctggttgccccatgctataatccaggtaacttgtttcgctgatttttattctatattcatatccattttcaaattcaaatccgccgataccccctaaggcatcccacccttctgcattttctttttttacaggatatacttctttcagataatcacgtccctctgaccatattacccccggcttcatttccgatgcgacagtcagcacatactctttataatcagtaatttttctaccctcttcgtcctccttatcacaactgatgaaggtaaatgtaaacaggagcagtactcccaataagttctttgttttcatgttactttgattttatgacgtccagtcttttattttcctttttagcatagtcttcgaaaaaatctattaccctcggatagaaattctcaaaactaccatattttacctgtctttcttcgtattttctcagcaggctcaccagttccggcatccatctgaaatttcgttgcacctgctccaacagttcattttttatttcttccggcttgtagtctttgtccagcatataacagataacagccgcacggacaagtgattcgtttatcacggtcttccaattgccatacgcttgtttcgccatactccaacgtgaagaattaaacaaatccgtggcagccggctccagttcttttacataatcaggatatttgttttcatccagaaaatgattgataaaagaatgattaaattcatgaatcagcgtcggcaaatattctttgctatacatgggcataccttctttattcacgtaataacccacaatagcgaaaacctccttcttatgtccttttatttgccggtctgctccatagtttccacctccattgcagaaaccgattatcacagaaaaagtttcctgaggttcatttccatagaaatcagcataccagtctatatcaaaatgactgatgacattatcctgataagacttgatgcccctttcataaaggtctttatgggccagaaagaattcattgaattttgtatccctataaaagctgctgagataagacagaaattcatccttatccaccttcttccatcttttctctaaggtcgaaacttcttcctctatcaatgaaaaaacaccgttccggttatccagatgtacagccattgacatgacggcatcataagctatgccatacttgttcctaagtcctttcatatactgcacggccggatggtcagtactctccttaaaatagctgtccatatcctttatatattggcccgccatatccatgtgatattccggaaaaccggccatacgcgacaagatactcataagctccacgttttcatttacctgtggaataatagactgtgcctttacacaaagagttgcgatgagcaggactaagaatatcacgtattttttcataatgtaaactgttggttattcatagaacttcacaaaagacaggttattttctaacatcatcaaaatgctttgatgatgcgaacttcttgggaagtctttcaaaaagcttctgaaatgtttctttgttcagtgaatgtctgtttatgtataatagataagcccccacaagattatcaatattacgttctatactttgaatattgagaatggagtcttcttttatgagttcattcatttttaaagttattgaatccttctgttcctgcgtcaaagtagaatccttcaaacatagattatcaagatgtcccaacacatgacttattgaatctattttaaaaccttctatacggaacaaatcattatatggagaaccatatatatcgaatatatctttattgctatctcttatgtatttcacttcagaatcttgtgtaaaaaccatagctacacttggctcattgcccacagcaggaactataactttaggcaaaaaatcttcttctgaagccttcggtaacttgaatgtaaattttccattcataactacagctgaatcaaaatatgtattatcaagatattcagttatatacatataatcaccatcttttacaccagtagttataccatgaattatacattgctgttctgtacacgacactaaaaaagagaatagcatcagtattccacataagttctttgttttcatgtcactttgattttagagtttataattctgtgttcactatctaaggtattttctacttgctatgacaagttcctcaaaatataaagcccggtgtattataaatactgcactaataaaattaaattattcaggcagttatgtaaagtatattttaatgactgttgcaataactattaatataacagctgcaaataaaagtatcactttattttttaggttcgagtccgtatcgcaaatatagtgcttataataaagacttagagataaatcttgcttttttatataaatatcagtatattggcataaaagtaaattctaatatgaaggaaagacttcttataaaatgtgatactactatttatgcagacgagattacaaatctgcttattgaaaataacattgtttctcgccagcatgatgaagggcaagaccaaaatcctggtgcttatggtgctatcacaggtattgcaatatatgttttcgagaaagattatgaaaaagctgttgagataataaatcctattgttgatagtagaaatgagtctcatgtctggtgccctaaatgtggaagttacaatgtgtcagccatagccgtaagcaacaaatacggaactgctatagcattatggtgcatctttctttttcttattccggggctttatcttgtttgggcaaatgatttgggtatcagatcaactatcgccgattatatagcattgtctatgtttatttcgttttttatagttgcattcttggggaaaatttctaatgccaattatatatgtaaagattgtaataaaaggttccaccataaatgattttttgtatcatatgaaataagccggccattatcgattcatattcatttatttccatacctttgtgtctatacaaacaaaaaaatatgattggaagcatccttggcgacatcgcaggcagcgtctacgagttccacaacatcaagacaaaagagtttcctttcctcactccgcagaagggatataccgacgacagtattctgaccctcgccacggccgactggctgctacacggaggagactgtgccacctattatttccgctatgccacccgttacccgtgtccgctgggaggcttcggcggacgtttccgtgaatggctccgacagggacagcaaacgggacagctccgtccttacggcagctgcggaaacggttcggccatgcgcgtaggccccgtgggatgggcattccgcacggaggaagagacgctgaaggctgcacgcatatcggctgcctgcacacacaatcatcccgaaggaatcaagggtgcccaggctacggcactctgcatctttctggcccgggatgggaagagcaaggaggacataaaaaataccgtcgaagcgaagttcgactatgacctgaacttcacctgcgacggcattcgtgatacctatcaatgggacgccacctgccaaggcaccgtgccccaggccatccgcgcctttctggacgggacggactttgaggactgcatacgtacggctatctcactgggtggcgacagcgacacactggcctgcatcacgggcagcattgcagaagcattctacggcatcccccctgccctgcatgctcaggccatgcactacctgccgacgcatttccagcagattgtggcggaatttgaagaaaaatatgggccgaaaattcactaaaattcatcccataaaaaaacgcaagtgcatttaagacaaaacgcctttacgttttacccaaaacacaagtgcgtttcaagtaaaacgtaaaggcgtttttaaggtgacagaaaacctgtctgaggatttcttatgacagcatcccgcctggtacgcgaccaatttctactttctcgaatttatatcccaggcgtttaagttcaatggctaccccgatgcggaacatcgtacggcaggcacgggcaaatacatggaaggccagcgggctttgcggctctatctgttcgtggcgaatcaatcccacggtagtctgtccgcagcggcgaatgatatcctccagctggcgagcttcttctccgtcgagcgacaaaccgagtaaatcgcgcacgatgtgttcatccatgtcgtcaaagccctgctctccgtagtacgactgataagtagcctgtgcactggcctcccagtcttcgtcccagcagaaagctactcccaggcccagataggcagcccaggccaccgacaccacgggataatcacggatctgttccacggcatcggccacatactccggtgccaggtcgtgccagcggttgtccaggtcctccgtagccagcagagtgccgtccagcacatgatagtcagtacacaaacgcagcaattcctgctgcaatctctcttcaaaacgattcaaatattctgtatccattggggtttctttatttttccgccaaagatacgagttatataccagtttttaaatcgtgtgaattgcttttaaaatgatttgacattttaaggacttatccgcttcaaaacttaatcaaaatatatatcattcaaaaatctctacctacaaaaaatgaatactaaaatgaaaagaacaaaatatcactgatatttgaaaatataaacaataatcattatatttgttttaaaagtaaataaatgactttttataaaaaaaatcagaaagtataaaggggaatatcacgagcatttaattttatccaaccacaccttaaattaaacaaaacacctttctagtattttagaaatagaatcattagtgtcccgttaaaatgggacgagttaaacaattaatcaaaaagccccggaatcaggggatcatttagatctttgacatcattgaaattagtcttgtcgaacaggtcacgcaagtgggttttgtcagtcaatgatatgctgagaatttgcaaaacttcataggttgaacgtttcaacttcatatcatgttgtacaatagccacaagacagtacgtgataatagccacactgatttgtatgcgaacagcgttctctgttgtgccccagaatttctttatcttgagatgctgcttgagccatttgaagaacagttcgattaaccatcttttcttataaagattggcgacgtccagtgcagaaagttgttttgcattcgcaagaaagtgaactcacggtcatcctcttcgtcgtaatatcggacgagtctgaatgactcaggatattttttctcggagagatatccggtcagtttcacttccgcatctgtcattatgttctttggcattcttcgcttccatttgactgtcttatactttaagttcgtcttggctctgacaacaaagaaagagtctgtaagatgtatcctatagagttctttaaagaagtcataagccctgtcgaatatataataagcatttggttcataatggattgaagacattgctgtggaatcatgctttgatgcagtggttacagtatagaaggcaggaacttgtgcttcaatgtcgtataagacatgagctttcacccctcctttcttgcttcggaactttgcccatgggaatgttgcaagacacaacggaatcgttgttgaatcaaacgcatatttctttccggaaatgtcaaggatgttggtcgtccgcttctcgcaggcttccttcatcatatagaatgcaaagtcttcgaagattctgtaatcacggttctggttcgctgtcgcaagagttgtcttggctatcggttcacgacctaaaccaagatgatattgcttggccctgtgcgcctcgaaagcaacgattaagtctcgcaggctctcacggttactcagttgtccaaacatcatcgcgagcatctgattccagcaagtgaaatgtttcacatatctgttgccatcatacttgcgaacatagttgttgaactgagtcctgttcagaaaagcagttaattgagagaatacgtatttgtcctggaacatagcagccatttgtattagactgcaaagttgcaaaatcaagtccgtttcatttcagaaaaccgtgtaattgactatatttcaataatttcaaagaactatttatccacttttacgggacagtagtgatcaatacaaattacatcagacattttatcaccattaatatctcccaaaaacattttccagaaatctgacagatttaaatcggcccatttcgttggggttatcagctttactccatcagataaagcaacgcttaaattaccacttttttgtgaagggtaatatgccacaccatcatcaagagcatctccatttacatcacagaaaaaaacataatcagcattattaccaaaatcatcatttcttagataaacaccttcttttgtaaataatgtggaataaaatattcctgaattcttttgtgaatatgcatttatacaaaaaagaaacaacaataaaaataaatagtttttcataatatcattcttaattactttattattacttttcctagtttatatcttttatgagaatccgaatcattatatggcaattcaaaaactggagttccatccatcaatcctactgaaacaaatatttcatactctccaggagaacacgttctattcataaatagatttaaataaagggttaatatcaactttcacaacaaatatcacttttttagcaaaccaatgtttataaaatcatctatccttttgttgtttccatccatattatttattttgcattcaaaaaattatactatgaagcaccttcttttatgcttagttttattatcaagtatataccatcaggtttatgccacaaaaaataattacaactttcagtatattaccctcaatgaaggcttatcacatgcagatgccaataccataattaaagacaataaagggttcctatggattggaacatacagtggattaaatcgatttgatggaatccatataaaatcctattataacaacttagaaggggcagaaaggcccaatgctaaccgtattctagacatggatatttcagatgatggaataatatggataggaagtgcttatggtatatattcattcgataccaatacggaaacctttacaaactatcaagcaaaagacaatcttaacaacaaagctatttggaaaatcataatacaaacacaatatatatacctgcaagacaaaaacaacaaaatacatttatacaagatagataaaaaacagcatcaattaatacctattaaccacgaaattaatcacaaaccaatacaaacaatacacaaagacaataaacacaatgtatggtcggtatcatcagataaaataactgtaatttatcctgatttatcaaccaaagaatacaaacgccccgcaatcaatcataatatcaactgtatactcattgatacatctacaaacaaagcattatttgcagcaaatggagaaatctatcattacacaatctcaaaaaatcaatttaaatacaacaataaaacaatattgacaaatattccaatcatatctgatataaaaaaagaaacagaaaatgattattggataggtactcaaaatggcttgttcaaactaaatataaataacaatacttttgaatatatagatacagaaagtggacctttcaagttaaaatctaagcacattaatcgcctactaatagacgatactggtactttatttatagcaacctacgcaggaggggtaaactacacaaacttacgaccattcctgaaaaccatttatcaaacagcagataagcaatttagctttattggagaaacagtccgagacattgatgaatatcaaaaatatctctttatcggtacacatactaatggtattctacaactaaataaagatacttataatgtcgtacgccatatcaaaaccaataactgcatagcggataataacatacgaagtatggccattgatcaagatgaaggacttttatggattgcacatggcaaaggattagaagtcataaatatccatactggagtaaacgttacaaccagcaaaataaaaaagataatgcctcaaaaagctgttacttatctaagcatagataagtttcacaatgtctgggcttttgatgataagggaatctttgctttgcgtaaagaaaaagatactttttacccaacttatcttaaacctgatataataaaaaaaattatagataataacactgaatgtgtttttctttcatgtgataacacccgcccagaaatctacttttctactcagaatgctttttttagacttgtaataaacaaggaagccgaaattataaacatagccaaatatcaacacgacgagaaaaacaatcaatcattaaaatcaaattttattagctccatatatcgagaaaatgattccatattatgggtgggacacataggagatgcattaagccgcataacatttctgtcccaaaatacttataaagcccaaaattatcctattgacgaaatttataatttcaaggactttgaagagattcaagcagacaaatttgggaacttatggattgcaggaaatggccttttagtatttaacttgaaggaaaagaaatacagaatgctagcgacaagtgaaaaccactctataaatagttataaattaagagccggatataaaagtattgacggtacaatttacattggaggaaataatgggtttacaattattcctcctacaccatttaatgatgaaaaaaatgttgctaagccagaagtaacagacatttacgtaaataataaacctctcaatcttccatatagcgcagcaaatgtcaagtcattgacattaaaatacaatgaaaataatcttacgttctactgctccacaatgaattatgtgtatgcacctgcttgtaaaattaaatatcaattaaaaggtgcagacaagacttataaaattaataagaatgcctctcttcctatcaactatgttaatatggctcctggcaaatatgaatttgaagtttatgcttgcaataataacgatcaatggaattctcatccacgaaaaatacagattaccatattaccaccatggtggctttcccttccagctaaaatagtatatggaatcctattttttattactctatatagcatttacagatacttaatgagagtcaataatttgaaacatcaaattctaatccaaaaaatagaacaagaacaaacagaaaaaatcaacaaaatgcaattacaactttttacaaacatatctcatgaactaagagggcctttatcacttattatcggaatagaagaacaaatgcaaaaacaaattagtaatatacacactctcaatcttttaaaagtattacataaaaataccagcagattattacaattaataaatgaacttatggatttcagaaaagctaaaagtaattcctttaagcttatggtccaatcttttgattgtactgcctatatacgctcaatagcacaagaattcaagagtattgcagaacataataatatagattatcggattataaccccacacattccgataaaagtatactcagatcctattttattagaaaagattattctaaatctgcttaataatgcctttaaatattgcaacagcggtattattgaaatagaattagctgaaaaaatggacataaataacgagacattaaaaaatagaacagaaatattatccggttacaaggctaaggcatatttctatatccgaataaaagatactggtattggaatttctgcagaatcaatagataaagtttttgacagatattatcaaattgaagattctgaacatgatcaacatttaggatcaggagtgggcctggctctagtaaaggaattagtattattacataagggaagccttactttatatagtgaacgcaataagggctgtgaatttattctttgttttcccgcagatatccaggactattcatcaaatgaaatcaaacaacaagagaaagaaatttcaataagcagtttctctacagaccatttaaagaaaaagcaaaacacattgcccgaagaaaacaaacccagtccaaacacaaaactacctatcttactcatcgtagaagataatcctgaaatacaaacttttcttagaaacagtttatcacagcaatataacatcataacagccaatcacggacaagatgccatagagatattgaaaaaacatatcccagatattatattaagtgacttaatgatgcctgttatgaacgggaatcaattgtgtgctaccatcaaagctaatccacaattcagtgacataccattcatcctattgacaggaaaagatacactccaggcacaagaggaaagcatgaaatgtggtgctgatgtttttttacgaaaaccaacaagtataaatgttctacaagacactttgcaaaaccagttaatgcgataaaaaaaatccaacaaaagatttcacataactatcctcaaatggcaatttataatcggttaacatctgaagaaactgaattagctcaaaaaattatatctattatcaataagaatatttcaaatcctgaattagatgcaaatcaaatcagcaacctaatgggaattagcagaagtggactttatctgaaaacaaaaaacattttcaatgtctctattattgaattagtaagagaaattagattgactaaagctatacaaataatgtgtgaaggtaatcattcaatggcagaaattgctagtaaggtaggatttttaaatcaatcgtattttacagcttcgttcaagaaaaaatacaatatgaccccaacgcaatatataaaacagcttaaaaatgagacaaataagtcctgataaaaaacgcacttacgtttactccaaaacgcaaggacgtttgaaaccaaacgcaagtacatttcatctgaaacgcccttgcgtttcaatccaaacgtaaaggcgtttttttaccaggaaggagtcttcaaaaaaataacgtccacagtcccggaaaactcaccggaaactgcggacgttttgtatataaaataatatgcgatgcttagaaagccttatggtagagtgcttcaatgtcttctactgaagtcggacgcgggttacctccggtgcagacatcattgaatgcatcgatagccaactgatgcaagtcttcttccttcacaccgatttcatgcaacttctgtggaataccgatactcaaagaaagctggcgaacagcttctaccgcagcttttacaccttctgcttcgctcatgccggtagtatctactcccatcgccttagcaatatccaggtattttggtgcggcaggagattctgcattgtattccatgacgtaaggcaacaacaatgcattggctacgccgtgcggagtgtcatagtgcgcaccgagaggatgagccatagagtgaacgattcccagacctacgttgctgaatcccattccggcaatatactgtgcctgcgacatggcttcacgagctaccggatcactgccattgtccacagcagccttcagattcttggcaatcatctcaatggccttcagttcaaacatatctgacatcacccaggctcccggagtaatgtagctttcaatagcatgtgtcagggcatccatacctgtagccgcagtcaggcccttcggcatagaatacatcagttcagggtctacgatagctactgacggaatatcgttcgggtctacacataccattttcttggtagcagcctcatcaataatcacatagttgatggttacctcagctgcagttcccgcagtagtaggcagagcaaaagtaggcacagctttatgatgcgtatctgctactccttccaatgaacgcacatcggcaaattccggattgtttactacgataccgatacctttagccgtgtcaatggaagaaccgccacccaatgcaacgataaagtcggcaccggaagccttgaaagctgccacaccgttctgcacattggcaatggtaggattggcttttacatcactgtatatttcgtaaggaatacctgccttttcgaacacttccaccactttgtcggctacgtgaaaacgaatcaggtccttgtcagttacaaaaaaagctttcttgaaacctctacggcctgcttctgtagcgatagcttcgcgacatccggcaccaaagtaagaggtctcgttcaaaatcattctgtacataatttcatggttttaaaaggttagatttaatatttatttcggaagatggaacacgtccgtcagttcctgcatttgttctttcgtcataccgtccggttcaaatcccatgcaacgggcattgatgtaaatctgggcagccttggtcagcacgtcaatctggtcgaatgcatccattacatcggtacctacggcaaacacgccgtgtttttcccacattaccacatcatagtcgtccagttccttcagtgtagcatctgccagttctactgagctcggcattttataaggcacgatacccaatccacgcggacagaatgcctttgtttccggaatcatactccacaacagataagtcagcacatccttttccaggaacttcggagtatggctcattgccaccagttcgatggggtgtgtatgtacggtagcctttttctgggcaccttccgcaatcagcgtattgtgaacagtcaggtgagaagccacttccgaagtcggcatcaccggctggtcagcgataatgacatagctggcacaatcgtcacagatacgaatcactgaaccgttttccatcggccagcgagccaagtcgcgcatacgtttctgtgtacctttgcagaagaagtaacagcctttcagatgcggtaataccgctccaatctgtttcggttcactgatagccggcatctgacggatttcatcgtctacaaactctgttacattgatggtgatatttccaccgttgcgttcagcccatcctttttgccacaaatatccggccacttcggccactttattgatttcacgggccaaacccggacgtccttcaagaattgatttcattatattatgtatttaaatttgatttttatttcaataactgcggaaggaaagaagatacaatcaggacaatcagtcccagtaccagtacccagatggtctttgcagaacatcctttccattccttcagaataattccccacacattcgagaatgtcacgtttagcgacatcaggatacaccaggagaacgtaagcagtaccggtgaagctatcaggaaaccttttcccagactcaagccaaagaactgactataccataacacaccggccaacgcacagaacagaatgttgttcacatacagtgaggtctttccatagtcaccccatgtcttgttctttgcattctgataaaaacagtacaccatgttggtaaggaaacctccggcagttaccatcagagtagccggcaaagttttatacacttctgcactttccgggaaacacaaactctgtccgaatcctaatccgatactgaaacaggcgctcatgaaaccggccaataaagctacgaaaattcctttagtaaaattgaaatctttcacagcttttttcttttcttcctcactcaggctggcagacttcatatttcctgcataaccgatgatgccgatacccagcaaagtcacaatcactcccacaataaccggcatggtcagttcctccatgtgaccagtaaatatgggcgtcaagattgttcccagtccggcacaggttcccagcgagatagactgtcccaatgctactccaaggtagcgcatactcaaaccaaatgtcagaccacccactccccagagtacaccgaagaacatcgcccaaagcgtatcggctggatgagctgcataaatctcaaaaaggctgtgtccgtccggaacagccagcaacgcgcccaagaaaggaaaaacaagccaggcaaaaactccctgcacaatccagtaagattcccagctccagttctttattttattgatgggtacatagcagctcgactggcagaatgctcccactgcaataatcaacaatccgataatgatttccatagcctataaattaagccagccggacgacggacaagacaagcttttcccgccatccggctgtaagattaatttctcttagaagttacttccgcttcgtatttttctacttcagcaatgtattcttcgcctacaggtacattattcttcaagcagaacatatcccatacagctccccaaggcaatgacttgcattcttcgagcaatgccagacgctggaagccacggtcagtttcttcatagtcacgcagcgtattcagcggttcaagcaatgcctgcaacaggcacttctgtgtagcacgcataccgattacatacgcaccgatacggttgatagaagcatcgaagtaatccaaaccgatgtgtacacggttcaacgcattgcaacgtacgatttccttgcacaaatcgagtgtatcgtcgttcatgatagttacatggtctgagtcccaacgaaccggacggcttacgtgcaacatcagttccggtacataaagtaacagagaagaaaccttatcagccacactttctgtcggatggaagtgaccggtatcgagtgtaatcagtttctggttctgtacaccataaccaatatagaagtcgttagaacccactgtatagctttccagaccaataccgaatacttttgattcgatgcagtccttcatgtgatcgtacttctgtgcaaaaatctggtccaaagaatctttcagcaatgcacggtacttcatacggtttacggtaatatccttgctaccatcgtgtacccacaagttcatgatacaaggatctccctgacgcttacccatttcttcagcaatggcacggcagcgtttggtatgttcaatccagaaatcacggatagccttgtcaggatttgacaaagacaagtttccagacttcgggtgagagaaagaagtagagttgaaatccagcttcatgtcattctcttttgaccactgcatccagccttcaaaatgttttacttccacctggtcacggtcaacaaactgtccgccgaattcaccatatatttcgtgcaagttcaagcgatgttttcccggtacgtaagaagcagccttcaggatatctgcacgcaattcttcaatgttacgagcctttcccggataatttccggtagcctgaatacctccggtcagtgaaccctgtgattcgaatccggtcacatcatctgcctgccagcagtgcatagacataggtacagactgtaaagtttccattacggcatccgtatcgatacccaatttggcatagcgttctttcgctatttcatacgcattgataatctgttgttctttcatggcaaattattttttaatgattgatatatatttctgataagcttcattccacacttccgcatctgccggtgagaaataatccggttccacattgacagaaatcacgttacgcatttcctgcaacgtacttactactccggctgctttagcctgaagcatgatatttccaattgaagatgcctcgctcggtccggccacaaccggcaagccgatagcatttgaagtaaactgattcagcagtttgttgcgtgaacctcctccaatgatatgcaacttttcaatcggatttacggaaagttcacggaatacatcgagtacctcacggtatttcagtgccagactctcaaagatgacacgaataaactcaccatgtgtctgcggtgcattctgtcccgtacgtgcacaatactcacaaatggctttaggcatatcctgtggattggtaaatcccgagtcatccggattgatgaagcaagcaaacgggcgagcagcctgagccagttccaccatctgcggataagtataatccgttccttccttatgccatttcttcagacattgttctacaatccacatacctgtgatattcttcagcaagcgaatggtaccgtctactcctccttcgttcgtaatattatagtgagttgtcttttcattcacaaccggaccatctgtttcaattcccatcaatgaccatgtacctgaactcaggtaagcaaagttcttgttggcagccggtacagccgctacggcagaagctgtatcgtgtccggctacggcaattaccggaacagattctatctgaagttcttcacacaaatcctcggtcagcataccgactttagctcccggttctaccatatccgcaaacaagaatttgctgacacccagcacttccagtaatttttcatctaatttgcgtgtttccggattcagcaactgagaagtcgatgcaatggtatattctgtcaccatctttccagtgagcaaataagaaagcgcatccggcatgaagagcaggcgactggcgtgcgtcagtccgaaatccttccgttgttttagggtatacaactggaaaatactgttgaaatccatgtgctggattcccgtctttccatacaactcatctgccggcattaccttttcaaagaactcttccttcttaccgatagtctgcgggtcacgatacgcatacgggaggcctatcagtgctccttcctcattcacaaaagcaaaatccactccccatgtatcaataccgatagaagtgacagatacttttttctgtgccacagcagccagacctttcttcaaattctcatacaaggaaaaaatattccagtaaaaatgtccgttgagttgcagcatctggttcgggaagcgggtaacctcttccagcgtcaatttatcaccagtcagcgtccccaatatggttcttccgctagttgctcctaaatcaaatgcaataaaatatttggaatccatgctaaaagtttatttggttaactactgtggcaaaagtagaaagaaaaaattcccttcttgcggaagaaatgactttaaaatataagtttttgatttttcctgctaacgaaaattcaggagtttatcagggattttttatctttgcgaagaaagggacaaaaaatggaaaagaacagcgtaaactataaatatctggtacgaagtccgcgcgatatagactggggaattaccgtggataccgtaggttcggaacccattccacccaactatccggtgtacccacctcgtaccggacatccggatgccttttatttcactccctcacgcggccgtgtgctggacagctaccagctattatacatcactcacggaaaaggctatttctatacctctcccgacacatttatcgaaatcaaggaaggagacatcttgattctccagcctcacgtatggcacagctatttccccgataaaaaaaccggctggcaggaatactggatcggatttcagggaatcaacatggacagccgtttccaaaacaacttttttgcaaaagaccagattgtttatcacatcggtgtgcaggacagtatcgtaaaactttacgaacaagccatccaggtggccatggaagaaaaagcggcctgtcaacaatatctggctggcattgctaatcttatcttaggcatgaccatgtactactcgcagaactacgagttcgacaacaaagccaccgagcagattagcaaagccaaggtattcatccgcgagaacctgctaaaaggtataggcccggaagaagtcgccgactccctgcacatgagctattcctggttccgcaaactgttcaaagagtataccggactttctccggcgcactacattcaggaactgaaaatccagcaggccaaagacttgctggccaccactcagcgaagcaccaaagaaatagcctattacctgacctttgacgatataccttactttaccaaagttttcaagaaatatacaggatacaccccgcaatcctatcgaaaaaaattcggaagagaataaaaatacaacctccttctgcgctgaagaatcactcacagcaagcagaaggaggttgctttgttttatgccgatgtatagccgagaattatttcactacaaaatggtaagttcccgacaacaattccgccttacacattccaccctgatacgtcacttcttttataccctcttttccagcttgtaacgcgcgaccattttcagttacgctatccattgaagcagcagtcaaataaagtgtcgcactggtattcgccggaaccgtgaatgaatacctcacttctccatccttcacttcccatgcgctttctatacgtccgtacagcgaatcataatatcctctggcaaaagtcatctttcctgtagggtctaccttcggacaaagcacaaaatgcttgaatcccggatgatgctcatcccgcataattcccagcgagtaggcatacatccaagccccgacggctccaaaggaataatggttaaacgagttcatccggttgttctctccaaatccgtcgacatgcgtatacgagttcaggcgttcccaaatggtagtagctccctgctccacagaatacaaccacgaaggataagtagtctgttgcaacaagttataggctacctcatcatatccattatccgaaagtgccttgctaatccatgccgtaccgataaatcccgtcatcagcgaataagccggataagtctttccatcgtccgccacattctcccgctgcaccgtatgcgccagattagctgcaaaccgctctttccattccggattcacaatgccgaaagacaaaggaagcacatacgaggtctgtatatccaccagttttcccttttccggaccgtttgttcccgaagaaatcgttttcgccgtctgcgggtcgatatatgtacggttaaaaaacgacttacgttcgtcatacaacttctcaaacttttctgcatcctcctttttacctaaaatctgagccacctttttcatgatgtccaggtcatagagaaagtacgcttcccacatcagtgtcttgtcattcttgttatcctccggtcccagccagtcacccaagtttccccagaccttctcctgttccagtacgcccgtctccggattgatattcttggtccgcacataatccacataacggcacatcgcctcatagtgctctgccagcaagctcttgtcaccatattgctgatacacttcccacggcactgtaatacctgcacttccccacagtagaccaccaaatccgccacctagaggagccacatccgggaaacggccatcctcacgctgtacgtccctcatggcacacaaataacgacgcaagaactgcggcacatctaccaggtaagtagccgtgcgggagaagaccgatatatcacccgcccatcccaaacgctcgttacgttgcggacagtcggttgggatagagaagaaattggcataagtagaccacacaatattgtgccacaactggttaaccttctcattagacgtttcatacttagatgccagtccgtcaatcgaactcaacaccactcctttcacatcctccagcggcaaagccttgtctatgcccgtaatctcaataaatcggtatccatgataggtaaatctcggcgcaatcatttcatttcctcctttcgtgatgtatttatcctgcgccatagctgcacgaatattttccagcataatcattccctcatttccggcataacgcggcaagtcgggatatttcacctcggcataacgcagattgatttcctgtcctgccttcattcccttgagggtgatttcaggcactcccaccatattctgccccatatcgtacacaaagatgcccggacgaacctcttctaccgattgtgccgtcagcttctgaatggcctttaccgtctgaccgtattgagccaccaagtggaaattagaataatcatcgacttttggcattgttcctccacctaaccgactgacatgacctccgagcgagacttctactgctttcgtccaggccgaatcatcatatcccgctttcgtccatccttcaatcgctttttctctcaaggcatcatatacctcgccctgaaagaaactaccatacaccacaggcccctgattaaaatacttccacgtatctggagaagttacgattgtctgtacctgaccatcttcataagtcacaaccaactgtgccagcaacgactgacggtcaccaaagaaattccagttttctccggcataagttgctcctccgctccaccatccttcggccaaaattgctccaacggcattcttccctttcgcaatcagttttgtcacatcgtacacctgatacagatgcgttttattatactgtgtcacacccggattaaaatagtcctctcccacacgctgtccgttgagatatatttcataaataccccgggaagtcacatacaaacgcgccttacgaaccttatgggaggaagtcacaaactccgtacgcagcatcggcatagcgttacggctgggattctgtacatagcacttctttgcgccattcaacagtttagcatccaaggtgacagaagctaacttgttctccggactccggaaattgcgaatatccgttctgactcctgaaaaatcagttgcgtgctccaacacataccccacatcaccgactaccggaaacgccacgaaatcacctccctgtcccaaaggattcagattcacttccccaatctgcacctctccttttttcagtgtagtgaaacccagattggaatacaaagagaacgtatgcgactgatattgattctccgcattcagcacatcagcgggcaacataaaagatttcaaaggaacagaaagtttgtcatccggccgataaccggcacgataaatatgtacccaggcatttcgtccgtctttcaaaggagacaaatcgaattctatttttatgtatgactcatcctttccgctggcaatgtgataaatgttcttattcgcatccatcagacgttcatcgttggcaccatacacaaatgctatcttacgcgacgcagcctgctttttcatctgaaatgaacaatccagtctgaatactggcaaataatgtgaataaagcaccatatcctcgtcactgcctccaatccaacgtgctccgttccagccctcgttatcatcagacgtcatcaggcttgtctcaaaccaagaatctttttccgcaatttctcccttattgttccagatttttactttccaggtataacgggtagccggcttcaacgcctctccctgataagtcacatgctgggacacatctgttgtcacttttccggaattccagactacctttccagcctcatcctttacctctaattgataagctgtctgatatatgcctctttcgtgtgggttacttacaagttgccagccgaatctggggactgacgtatctaaccctaaaggattctcagctaaccccactttcatttcagctattgacatgtattccttcctataagtgctgctcgataaaattattcctaacaaaattattatcgaagtgatttaaacttttcttttccttgcacattt

SEQ ID NO: 3772 - DNA, 11324 bp, Unknown
  gut microbiota DNA sequence
gcaaagttgtcagacaatgaagcgtttttctcttcatcgggtattcgtactatgcttctcagttctttcagtacgcgtttcacctgaaaaactacctgagcatctattccgtttgattcaagttcagactggaactccagtgccgcaccctcaagtaagtctgaatagatgaacagcttgtgcatcttgcgaagcatttctaccttgaactccggggtatagtcctgaagaagttctcccaaggaatgcggttccacctctctttcaagggagtcaatcttgttcttgattttctgtgctttggcaaagttcatggatgaaatcaaggcgatatacttctttctcagttcattgagctttctttctgattcttgtcttgtcatttctctacttttctgatgattaaatactttggctcacccttgcggagattgcttaatgtctcttcgtcaacctctgcttctgtgagtccgttcacgttcatgtattgtggaagacggtatttctcacgtaacctcctgatcaggttccagtcacgagttacccagttaattgtgattttcatatcattttctcaggctttcaccgctgaagaggacggttttcgttatcgccctcagccggtcaatggttctttccccatatttctctctcagctcgtctatcgttaggttggtggtcaggataagaagctttcctttcttctctgcttcgtctgccagttcagcgaatgcaagccttttttcgccgtatttgacgctaagattctctgtccctatatcgtcaacgtagatgatgtgtttttgcttcacggcgtccaaatcagcgttcatctgctgtgcatcgtagcagcttaccaccttgcggcagtaatggttaagaaccaaaggaagaatctttccgcagataagggtctttccgcgtccgcagttgccgaaacacagaagtccgcgaccttcattgccggccagccagcctgccacttcttcgtactcaggaagccatctggcattttctccagtgaagtacctgataccggcccagagaactcttttggcatccggaacggttatctttacgacgttaggaataggggagaaacccgtatctttgagccgttcgattgtctgttgaaaatttatctgttccatgtttaccagcctttcttgtattttcccggtgaattatccttcagaactatgcctacatctgtttttgaaggcactttctcacgactggcccaggtcgccagccgtcttggaagctcccaggtcttttccagttcatagcgcatcttggtttctgacttgttaagctcgctccagtaatcgaagaaagcccgaatcatttctttcgggtactgactgacataagggactaacgactggtagaaggattctttcctagagagagtagcggctttagccgcgtctttctttgctactacgttagtagtagtttctttaataatattcttctcctttatttgctttgtgtcacccgtgtgtcgcttttctggctctttggcagggtgtgtcacctgctgtgtcgccacttgtgtcattagctgtgtcacttgcatccgtaaattattgatttcctgaatgatatttatgtcactcattgtgtcattgcttgtgtcacttactgtgtcagactctgagccattatactcattgtactttaccaaggttattacattcattccttgttctttggaaagagttatcatgttctctcttctcagaaaggcaagaaacgtccgtactttcctctcagaccatttccaacgctttgataagaatcttatggatgcaggatattgtcctcttgtataagagacttctcgacctccgatactctccatacggggcgttgcctcaaatcgtgctgactgaatcaagtcaagccacgcttcgcaactgctaaaagtccgggcttcattccacatatcattcgagaagaacttgcggcttagttttatatatccttccataatcttagaatcttacgttagtcaactgtctgctattggagtacacggcccatttaccgtttccgctatccaccaggcgtaaatccttgacttcgccaaatcgtttcagattcccgcaaaggtcaacgatccagccagcctccttgttaggatgcggacggatggcacgaccgactatctgataccaaagagccagtgacattgtcggacgggccatgacaatcgtatccagttcaggatagtcaaatccggtagtaagtacacctacgttggctacaacgggtatctctccggccttgaacgcttcaaggatatgttcgcgttcttttttcggtgtttctcctgaaacgatggctgttccgggaatggaccaggtgagacgttctgcttctttcaagaaacgggtgaaaaccaatataccttttcgttttacaccgctcttgggattcataagcctttggacgatgctcaccagaaacccgtagaagtcgatacgctcatactctttcactacagacttgtccgtgtagtcggctccggtagtgttcaccttcaggttaagttcgttccatcccaaaggattcatcggataatagttcagcttcgaaagataccccatatccaatagagtagagatttgaacctgatagattacctcagagaacacgcacgggcgtgtgcgtgtgatgaacttcaacatactgccgaaatccctgcttgatgaaagccggtaaggcgtagccgtcaatccaagaactttacatttcagcatcgaaagaaatctcttgtacattccgtctttcgggttaaccagatggcactcgtcgatgatgatattctgaaaatgctggaaaagttccggatggttgactacgcttccgatagtggcgaaagttattcttgaaatctcctttcgcccgaatgaggcagagtagatggaacaatccagaacaccatacgaacagagcttcagatagttctgttctagtatctccttactgggctgaaatactagcgtgtgcccttcaagacggctggcgatgtcggctatcacaagactcttgccggctccggtaggcagtaccatgatggcattgttcttcttggccctgttagcaaagaagctgactgcagcattactggccttctgctggtaatcccgtaaaacataactcataatcctttctccttactcagtttgtctcccaaagccttgtaatacttggtgagttctattaattcaaaatcagtccatttcttcgcctggcttgctctccatgccagcttgtcgaagcgttgctgaccgatttttgatttcaagtttttctcgtaatgtatcagatggtctgcgctgaaacggttgcacgcccggcactctgcgtgggcattgtcctcgtcaaagcgtgtagccatgtggcggcgcgaatggaagtgtccgcaatctgcctgttcgtatggctttatctgggcgcatgagatacaacggaaatacccgttcggcatacaatcacgaagccggatatagcggctgaaaactttgtcgagtttggccactaaatccggcttctttttaatcttgatacctgccttatcgaataacggcaaaggcttttctttcttctttttaggtttcttgatgtaatacatatttataaagccttataatcattcatactaccccaataaccatatatttcttcatcactctcaccattaagccgagctttttctatttctttattcatgctatgtgaaagaccagtcaaatctcctgaaagactttcgaatgacgaacattctttcgtactatttctgcgtattttgtgtgtaatgtatttttcaatactgttgaatattggattatccttttcagacattcttaaagatatatatccataattgaatgtaaatggagtatttaacttttcatatgactctctgtcttttatatgcttatacatcatttcaaccggaaaagtcattggcaagcgttccttcttaatcattatggctatcgcatcatataaagcctgttcttgatctgtcagcttaaaccagttgatattctcaaagcaccacatgatataaccaatatgagtaagtatgatatactttatctcttgtcctttgtatttcccaaatgttaatttccgttcttctttcataataattccattattggttgtggacgcaacgggaatcgaacccgcccaaccatcacggttttacttgctcatatattagctaattcaatgggacaagtgtatggagatattgcgcaattactccatactaaagcacgtcctgtgcttgcgcccgtatgcccgtctttccgggcgtttattcatgctatttcgttatttttaaaaactcaggggcaattccataaagtggtgtacggccatcccatttatctatgaattgcttatagagtatttctttagtcaacccacgtgattgaatgatagcctgttctgtttttaattgctccaattcgttgcgtttcttctgctctgcaatctgctggtctaatacagatatattggtattcacctcattacgactatcaatcttctcacgcacagcctttgaaaattcaagctgtgcagaaaaagtcagcaattgaagccctcttttctcaaattctttatccacaatctgctccaaccgcttttcaaaaagaagagaaccaccgtcagccattaaactgtctgtcttgtgcttacggctttcttctttgattaaatcataaatacgaggttcaagtatattatcttcaaggctttgcataaacccgtcttttcctgattctgtatcagctttatctatatgtttgttatcgaatacaacatctatagctctattcttgataactttataagaataagtaggacgtgcgttaaattcagtgttatcagcagccttcaatgtgacaggttcagcaaattcccctctttggtcaaacaatggaacttgaaacaattcagtgccccattcccaagtggaaactttaccggacactaccttaaaatcctcttttccttgcttcccatagttctccattagaacaccggcataattaggggctactctttcgcatgaagcaaataccactaaggtcatacagaccaacattagattaatcaatcttttcattcttcaaatttttaattagtttataaacgaaataaatcactgtggctgatattattaccacgcccagccaagcgttgaggtgattgaatattctgtttccgatagatactccgactaccagaaacagaattaaataaatttgctttctcattgttacacctcaatgattacgatgtcaggtgcaacacctttgattgcttcaacctgtttgtcaatcaccttattcttgtattcttcaatggcctcattcgcaccggcagaaaccaaagaaagggaaacttcccgtccgtccacatcggcgtagatttcaacttcgatttcttcacaggcaaaacctttgaaaagagggatattcagtttgaacgattttggcagattggaatcaaccacttgagaatagttatccgtcttgtttccgttttcctctttactacgttctatatcctggtttactttcgccttgaaattcttcaaagtagaaaccagcatcatgttctcagacttatccttgaagaaggcacggtgcatcttgaagaactgggacaatttgataggttcccatttcctttccgcattgataccgaactcctgcatttcctttgaagcctgtaaaactccactaattactgtctggtaataattggtttcatcaatagtcaaagccagacacatcttatcacggttcacaatgatattggccgatttctgattaatcagttcgacacgcttttccagccatctgaagggtgcttctatcgttccattgataactactctctccggttctttcgggtcaagggctacggatgctttaccttctctcaatactacttcgatgggggtaccattgtactctttcggtactaccaaattgattttgttttcactcatgattctgttccagttttacggttaatactaaatactgtcttctgcatttcttgtggcatgattgggcggctataaaccagttcacctaacttgttgtagaatcctaccatcttttctttatggtataggaattttgcacattcttcattctcgacgaactccgaacctcttttgatgtggtccaaaagttcctgcttttcttcattcaaaggcttcaatcgttctttgaagctttccatagcctctttcttctccaactcaacatcgttgatggtgattgatacctcggccaaagtctctttcttctgagccagttcttcgggggtgaatcggtgagtatatccgattttctctaccgcatcggcgttgtcctgaaggaactgccatcgttcctgttcagggatgtcttgtcctaaaaatttgtccatagtcaaataaactctttgttacgttcgatttaatttattattcaaacttccaacaatatccaccagcagtttttcttttatgataacagcaaagtgaaatatttcggtaatctacaccagtatctctataagcatccatcaatgttaaatggcgttttatcaaaactccatttttatccaattgaagaaccacctttccttgcgatatagctctacgtcttttagctgtaccgtaattaagattgtaagcatggctacaccattcaagatttcctacattgttgtttgttttgttttcatctttatgatttacaactggataattatgaggattaggcaagaaagattcagccactaaacgatgaatgtttactgtatgaatacttccatctttgaatagatttacgcatctatatccacatctgttttgtggtttcaaaatatgtggtttctttttcattaactcgccattttgaagccttacatgactgcatatagatttaacccgtcccatatctgatacttgatataaaccttcatatccggatatatctttccaattctcacccatccccatagcttagaaattctttatctttttctatctcttgttgaatatgtaatagaaactcattctcgttaggacttggtaaatatattcctgctttagcactagaataattccgaaatctttcaatagcgagagtcatttctcccgtactcagttcagacgagcttctcaaagtttttataatctttccttttttgttcgtcttttctttctcgaatatatccctattacataacctcttgaaaatatcgattttaacttcctctacactataacctgtttcacttgcgaaccaatttagaagcaaatagaagtatctgttctgggcgagcgtgcggttgggcagcttctttctcacttccacaaccgcccgctcctggaacagtttgtttacataagccttgaacttgggtatatcgtattcattcttcagattgaatatgctcataggctagaacggtaagtcatctttgggatttccattcgcatctacatcaggtggaaacgcctgtgccatggttggcgtttgtgtcggtgacggttgctgtgctggcacggatgctggctggtgcattggctgacggccttccagtttatagcagcggatggacaccatacgttttagttgtccgtcctgatttgtccattcccgaccttggagggaaaaggaaaccgttattacatcaccggttctgaactggtcaagttcggcacatttgtcaccacttacttcaagaggtagaatgttctcgtactggcttcgttcacctgtataggggtcataggttgtggcatcaagaataaattcacgtttcacaaacgggttgccaccgcttttggatgggatttcttggggctggccaatatagaccagccgtccagttatttgatttgccatattagtttgaataaaaatcttttatctgttggaaaatctgtccacgtcgttttatttctgcaattgcctgttcgtcacgagtgatacggattttacaatactcattgggaaggatattacgatgccagttggcttcgtcgtcgtaggttgttacagacagaaaaacaaggttacagcttttaagatgagtgcaaaagagttgttcctgaacctgataataataagctttatgcttcttcttgacgtattcgattaaagctttgttgtcatgcttgataggctcaataaaatcaaggtaatctgaaagataaagagtctttaattcatcaaaatcagttaactttcctttatcgatacaagcaaagtccaggctgcacttgaacacgttcatttcatctgacctgacaacatactgagtaaagtagttgtcaggcaaagtgagaagatacctgttctcaagaatggctcccgtacgtaaagcatctatagggctggcaaaagcattgtaataaggctttatcccgctgacgaaacgctgcatgagggcgatatgtgatttcgtattcttaccactcatcaaggcatgaacgtcaccgcttcctatgtacatggtttctgtcatatctttcctttcttcttgaggttgttatatgccattttaagctgttcgcttgtcatgtcatcagcacttcctacattgaaataagacagtatgttctgcgcaaactgattgtcggtcatcatgtaatcaacgacaatatttttcacttcatctactgtagcaggggtttgcactttggatttgttttcatcagggtcttcacctgtagcaatcttataggcattaagtaaagcgtattttctggcataagtagaagcctttccaaatcccttgtcgcctgggtcaagtccacgcccaaaactttccacgtctatgtattctgatgtgttgtccagattgataatgcgtagggtcatttttatgatgtccatatagttgatggattcccctccaccttctttgacaactctaattatttccgatttaacaagttcctgcttaatgggaatactgacaaggccatgcttggactcggcttctttcacttccaaggtgacatcaatgtcctgtactgccttgtaggcataattacctttgcctacggtcaggttcttttcgatattttttatctcatttgagacaagctgtatcttctgatatagatttggcttttcttccataataattggttttaatacatcaattttgcatgttttatcacgtcccaggcattacaagcccatctgctgtgtggcacgccttctttggtcttgtatcttatccttccggattcgcacaattctttcagccttttgagaccgcctactatcgaagctgcttcgtatttcccgaaagacttgttgtttaagactattttcaatacatcttcgtttatcataagcattttattttaagcagataattgccgagaaacccggatactctgttgctgatacccgatatttcacgtccattttgtttttaagtgtcccgatcaagcgaaggtcacgattgcggcgtgatgcttccagcttgattccgttgtgccgtttcttgtcatagggaaccttgtaaatgtcccctttcttcatttcgtcaaaaagacgtactgtttggtagttttcgtctactgtaatttctctaaccatagtttaagtatttgattgtttgctggcagaacgggactcgaacccgtgacttccatgctaacccttacatggtgttctaccgcctgaactatctgccaatgaaaatgccggactttcatagcccggcatctacccattttcaaaccataaaaactaatctactaagccagctaatgacttaaccatgttcttgaagttgtcaaacttcgattcaatctttttctcttcttccatgtaatacagcattgattttttgtattcttcggattctcgttgcagattctgtgtgtatgccacgagttcatcatgcgtcataccttgtaattcctcatttgttttcatgtctattctttttaatgttttttatttccgtttctatctccttatcaaatagctcccgtctgtccagttcccgtgagcgtgccgtcagaatggcactgatgtccgcaaattcatcacagatgctttttattgtttcttgcagctcgttcattgtccagtctgtttgcgattgaaaaaccagtgattataaacccgacaaatcctatccagtacatagcagacaggtcttgattgaagtgcattaccagaacggacaatgcacagagaaaaagtagtattttcataaccgtgtgtattaaatatcgttcccgtgggcgttccggtggttgccttactgcttatcaaaggtctggtaagccacgggtatatatagttcatgctggtgtctaatcagtgaagattgtctttgtagccgacctacggccacctgcaatcgtataagtgtctttttgttatctgtgtgattcgtatgctgcgtttgcttagtgcagccctttactcatactcttttcacacagccgttatcgctactcagtcgtccgtttcacgtcaggcttaacggtaagcctaaatttccatcatgtcaaagaaccaatcaagtagaaccctgcccgattctcgctatcggttgccgttcagtccgtcagcagggtaggtgagttaccagcgtgtaactgccatgccttgtgataactgaaggttaatgtagtccatgccatcatcttcaggcaggttgtattcttcaagaagggcttcgtatttgtccacctcttcagtaagtactttgatgtattcttgcttgctgtcagcattgaaagccctgcataaagtctcttcatctgcgttgtaggcgaagttcaggtctttgtacagcccgtcaagttcttcttcgatttcgtggcgtgtcatagtcatgcggcgatgtttaaaaggttagctttcttgaagcatctgtattcttgtctctcagtatcgaagtacacctgaacagtgtcattcttctttctgctttcaccagatgtggctggtatcagattttctttcagcgtgccgtaggcttcacgaacagaaccatctacctttttgaagtagaactttacgattctttgcttcatggcagctttcagcttcatgtttgcccaagcgcatttcatcgcttcactcatagagaaaccgtttctctttaccaactgccatgcaagactcataatctcgtgtaataaattctttttcataatcgtgtgagggttagttgttttttactatatttgtttcgtatctaagtttcgatatgcaaatgtactttataattctaaagtatcaaataaatag

SEQ ID NO: 3773 - DNA, 6494 bp, Unknown
  gut microbiota DNA sequence
ctattgtctacaaaagaatattttacattatccttcaaatctaataaagcaaaagctactttatatttttgattccattgaggaatgtttgtagggcagtatccccacccaacattttgccaaacatgttcaattttcacatatctatcagaattcactattagtggtaatgaaaccgaacttggatataaacgatacccaccttcttttaaaaattgctgaactaaatcaaacgcatcattaatccaggaagatgtctctccaccaaaacgtaaatccatcatattaacatgagcttccttactgtcatcatattctccttgacgcacatctctaggatttttataaccgcgaggatctttccaaaagctatgatgagctttcacaatccaccctccttccattattataggacggacataacgatatttttctgcaaatttacgctcccaacttccataatatgttgtcattccaaatgcgtcatgacgtaaagagtaaccttttgcaattgcttcttccaacattgattcactatcaatatcataatgttcatcatcaacccaatcttttccagtaccaatccaacgatgataattaataataactggcactttatcaaatgtatttgaatataaattagttacccaatcgaaaactgctttctttggattttcatcacctgtagaatataacaatgtatgatattccccccatttacctaatccgaaaccatctataaattccatttttttagggtcattaaattcttttcccaaagcttttacaaactttgtatagtatttctggaaaataggatcatccggatatggagaccatttacctctactaataaatcctttagctcctgcatttctcacaaactgaggcgtaaactcagaagctttatcacgactatctactacaatgcggaaagctaaacgcatatttcttttataagccccatctatataagctttcaaattagaattagtaatccatccatattcaccatcattaggattaaaatcagtccaactggcacgaatatataatgtatgggcataatctgaaagttttacttctttttttaaatcaggtacatacatatgatcatattcgttccaaaattctgatgcatccttgctcattgaagcataaataacccatcctgataaaggattgcgcaagatacgattgacatcaggctgaacgaccaccgtagtatcgttttttatttttgcataaatttgactcatgctacacatggccaacaatattaaccatactattatctttacattcatacttttatttttaaaacaaaagccatatctaaacttaaatctcaaaagacaagtttgatacggcttttgtatattgctaatttaattattttgcatcaaaaattaccgtcaaattttcaatatcaagttccacataatttactgatgtaggaatactaaagaacgcatacctattattttcttgtccttgaacaacagtttgctgttttcctaaatcagcctcggtaagatcaagacaaccatcatatgagcctcttaaagcttctgctgttgaaccaaatgtataacatcctgcactttgtactcctattttaaacactaatcctccaggatgagaatttccatctttatcctttacagaattctgacgaggaagtttttcacctttgtaaataaataaataaggattagccaaacttggtgtcatagaatgtgctaaattaaaacctgtatcccaaggggtacttggttttggattttcagttttccaaccatcatatggtccccaaatatatactctctcaacaacagttgtaacatcattattattataactccatgtaatctctctaggctgaggatcagtatcaggagaataaatggtaatcttcttcgtttcaatattaatgactactcgatatacaccttgatttttaatattccacgatgaatgaagagctgcttcttccggagtcttgattgtaaaagacatttcttgtccatcagtaaaatctccaccagtttctggagctatagccattgattcttcaccatcaaataatattgggaaataaacattaccactctgaagttccgcatggaaagcatactgattttcattctcgattgtctgtgtcatttcttgtttttcagaaacacaagttccagatacaaagattttatcagctgctatataatcacttgcaagtcctatcgaaactgtatgatgctcaaaatcaacaagaaccctataagtgtctgattcaggaattacccaaacacctgctttttcagcacttttgacaactgcttccagttcttttcctccctgaatagtctgttcagcaacaacaggagaaatcacattaactttattctcatcctcataaacaattgggaaatttatattaccggcttttaacgatacaataccaacatatctaagaggattactaaccattggtctaatttcaatatcctctccatcaacggctgttcctgagatataaagtttatcagccttaaattctttctcaatatatgtttgaatttttactgaaactgtggaaatttccggcttaacaaactttgggccttccaaagatcctataatacgggcagacaaagttgttgttgtaccaggagttaattcccatttatctgtcaaaagttgttgtaactctttatgagtataacttttagaagactcaccatcaacgaactcctttataagagtattatcactaaaatcattagaagccaaatcaactttatatatatatgataacgaatattccgaagaaataggatcagcttttgtccaatttaaagtctatgcaatatcattaggagtatcctcattcaatttaatatcagtcgcagaagcttctataaccaaatctgagcgattatccaacggattaacatcattttcttcattgcaacctatcatacaacttcctactaataaaagtaaaaaagcctctttaaaactatatttattcttcatgattaatctaaattaattaatatatcaattaccagcaatccaatcaggggtttgacgcaaattggtgttcttatcaatatcatcctgaggtattgggaaccaataacttataaattttcttgtttcataaacaactcttttataataatcatccctatttccagcttgtgcatatgcgttcatggcatagaaatcaccgtccaataaatctttagctaatttccatcttctcaaatcattaaaacgcaatccacattcgcaatttaattcaacccttctttcctgacgtattagagttctcatttcttcaccacttgcaggaggtgtaatttccccttccgcataaccatactgaggaataccagctctttgtcttattctatttacatacttcaatatttcagatagatttgcagcatatgttccattttctatactccattcatttaatgcttcagcataacttaaataagcctccgccaaacgataaagtgaaccatgacgcgatttatatgttccactattttctttaggatttgcagtagggtcagttctcttacgacacatatatccagtccaaggagcatcatgagaaggacctccatcctttccatccataaagaaatcacagttacgtttgcctacccaatggtattcttcattatacattactgatatataaaatcttggttcacgatgagcgtacatattgtatgtattttttgcaacaatcaaattatgatctgcagtagcactaccatttcctgaaccataaatccaatttgtaggataatattcatcatctgttgtatatccactttcactatagttgtcaacatccggattaagaataggagagccatcagaattatatcccaaaataggcatttttccatctttcataaagaaagcatcaaccaaagattgacttacacagatagctcctactccatttaatcccataccacgtggagtacattgtttatcaaaatatccacctgaatccattgttcgagcaaaaagaatttcattatttccctcaatttttcgctttaacaaagcgttctgataagaaagaaacggatcaatagttgtcccatctgtcagatactcaatatgcaacttatgaccagcagcttcagcttcatcaataagtaattgacaagcgtcaacagcatctttccatctttgtggatctttttctttgctaaaaataggtgttccatcacaattcacaatatcagccatgtcgggattaccattcaccaaatcacttgcagcaaaaagtaacaatcttgcacgcattgcaaggcaggctattgaagtaacacgtccatatttttgagattcatcataagacgatggtaacactttcgatgcttccagcatttcattagcagcccaatcaactacatcgtaaaacggttcttgcttaagcattaaattatcagatgacgctgattcagcagcttcacgaatgattggtacagaaccatatgtcataactaacattgaatgaaaatatccaataaaaaagcgacattcagccttcatatattcaacttcttgttcagtaaccccaggaactgcatgtgcatattttataaattgataggcagagcgaattgctttaggaaatgtagtccaataacttatgactccaggactatcagccgtccaattacctttttgataaagaatagccttaaatccttgcgattcccatcctttagaaggagtcaattcatctgcaattgcatctggtccgtcatatgtataaaattctggaagttcctggtaaataaaagctaaccatctttccatattttctttattctcaaatacagtttctaatgttaactgatcatctggttctttatccaaataatcattacatgatgacatagagaataaagcaaagcaactcaaagcagcaatttttatatattttttcatatagaattcaattaaaatttaatttcaaaaccagcagaaatagatttcattataggataagcggcaccattattagtattcaactcaggatcccataatttaaatttagagaaagtaaacaagtttgatcctcgcaagaagaagcgaattccatccataccagcttgttgcatccaagttttaggtagagaatagcctaactccaaattcttcaaacgtaaaaaactcatatttctcaaccaccaagtagatgcttcactgttatttttatttataccatcatctaatcttggataaaatacatcttgactcggattttctactgtccagcgatcatctgcattagtaaacatatttccagttacaccacgattaaatccaggaatgatagaaccggaaagtatcctccaacttcttccaatgccttggaacaatactccgaaatcaaatcctttatattgaagattagccccaaaaccatacacaatttccggatcaactgtacctccaatggctgttttatcaaacacatctacttttccatctttatttacatctacatactttatatctccaggacggagttttgaagagaagttttgtgctggtatttcttctttaagaataccattttcgacatctacaaaatcatcttcagtaaacaaacgatctgcgacatatccaaataactgattaataggatgtccagttctggcacgatttgttcctacaactgcatctgcctcatcctgctcagttatttcattatgagcataagtaaatgttcccataacacttaaaaacaaatccttaccaatacgtttattaaaattcaaagctgcttcagcaccacgatttgtaacttttccaaaattactccatggctgttttataaatcctgctgtcaatggtattgattcacgttgcataaagattccatttcgtctttcatcaaaataatccaacgataaatcaagcattccattaaataaacctaattctaaaccaagatttgccttattaacaacttcccaagtcaaatcaggaacagcaaactcaccctcagccataccaacacgatcaaaactaccatcttctccccatttatacattcccatatcaccataagaatcagcaatagtagataaatacgcaaaacgacgaccacttaaattagcattaccaacctgaccgtatgatgctctaagttttaacttagaaataacctttcttgcaggttgcataaaatcctcttcagaaataatccatccaatagctccagaagggaaaaaaccgtatcgtttaccaggagcaaaattttcagaaccattatatccgaagttaaattctgctacatactttcctgaataagtatatgatgttcgtcctgcaaatccttgattacggtatggcaatttacttccatcatcataatttctcctattaaacatcaacatggcggaaacagcatgtttctcagcaaaagtatgatcataattaag

SEQ ID NO: 3774 - DNA, 26520 bp, Unknown
  gut microbiota DNA sequence
acatgggatttcttgtaaacgacaaacttgcagacgttatcattcctgatgttgatgtgagtgcgttgaataatgaagaatgaaaaataatgaagaattaagaatgaaaaatgaaaagcgaaaacgcaatacacttgccgcttttactttttaactattaccttttaactcaatatgttcttctgttcttttgtctaaaaaaagacataaaaaaagggaatcttcccagactcccaatcttcattaaccttaaatctaataccatgaaaaacacgatgcaaaggtaaggtttttatgttatgaaacatataattggggcgaaaatctgcattgaattaactatttttatgttttaaaacagggaagcggaatttttacaccggttttttctgcttggaatggagattccggggctaagcgcttggtgattcgttttcaataatgtatctttgtccttaaaactaaaatgaaagacagaatgagaagacagtttgtaagattggcattgtgtctgttcctgctggggggatccgtcgcgtatgcccagagcggaatgaccgacaaccaggtgatagaatatgtgcaacaggcgcttcaacagggcaaggaccagcaaaccattgcgatggagctgctggccaagggggccactcaggagcagttgctgcgattgaagtccatgtattcgggttcgacgggcgcgtcgacatcgggcagcggttctctgacgggggaagacagctcgctgctgggctctggttcacgggcccggaaaactactgcgaccggtacggaagaggatgcttcggaattcctggagacaagttcgacaaacgtggacaagagcatgtggtcggaagacatgcagaagaccatgaagaaacgccgcaacctgacgacggtggttaccagcgagaacgatgtgttcggacggaatatcttcaacattgaacagctgactttccagcctaacctgagcatggcgactccggaaaactaccgtctgggaccgggtgacgaggtgattatcgacgtgtggggcgctagccagaacaccatgcggctggagatttcgcccgacggctatgtgaacatcataaacctgggtccggtgtacctgaacaacatgacgattcaggatgcacgccagctgctgaagcaggaactgggaaagatttatgcggattcgggcaataacatccaggtgacattgggaaatatccgtaccatccaggtgaacgtgatgggggaagtgatggcgccgggtacgtattcgctgtcatcgctctcgacggtatttcatgcgctgtacgtggcaggcggtgtgagcgacatcggtagcttgcgtaacgtgcaggtggcccgcggcggcaagacgtttgcccgtctggacgtgtatgagtacatcatgaaggggcagattcaggacgacatccgtctgcaggacggcgacgtggtgattgtgcctacctacgatgagctggtgaagattacgggtaaggtgaagcgtccgatgttctacgaaatgaagaacggggaatcggctgccactttgctgaagtatgccggtggttttgcttcggatgcttacaagaagagtatcagggtgttgcgtaaggacggtaaagaattttccgtgaaaacggtgaacgatatagactattctgcgtttaaattattagacggtgatgtgatttcggtggattcgattctgaaccgcttcaacaaccgtctggaagtgaaaggggctgtgtatcacccgggagtattcgagttgagcggttcgctgaacacggtacgccagctggtggagaaggccgacggtttgctgggggatgcctttacaggacgtgcggtgttgtatcgcgaacgggagaacctgacgaaggaggtgttgccggttgacattcagggtattctgaacggtacgtcgcccgacattgccttgcagaagaatgacattttgtatatcccgagcatccacgacttgcaggacatgggcaaggtgaccatcagcggtgaggtgaacaagccgggtagctatacgtatgccgaccacatgagcctggaggacctggtgattacagcgggcggtttgaaggaatcggcttcgctggtgcgtgtggacgtgtcacgacgcatccgtgacccgagagggacgacggagccggacgtaatcggacagaatttctcgttcggactgaaggatggtttcgtggtggacggtgaagcgggatttgaactgcagccgtacgaccaggtgtttgtgcgccgcagcccgagctacaacgagcaggtgaacgtgacggtggacggtgaggtgctgttccgcggtgactatacgctgaacacgaagagtgaacgtctgagcagcttgattcagcgtgccggcggggtgagccgctatgcgtatgtgcgtggagcgaagttgcgccgcgtggccaacgaggaggagctgcgccgcatggaggatgtggtgaagatgatgcgccgtgaaatcggtgatgccatggccaacacgctgggactgaaggtggacagtacgtttacggtaggtatcgacctggaagctgcactggcgaacccgggcggagacgctgacctggtgctgcgcgagggcgatgtgctgaccgtgccggaatataacaatacggtgaaggtgaacggagcggtgatgatgccgaacacggtatcgtatgcggcaggcaagagcgtgaagtattacctgagccaggcgggcggttactctgccaacgccaagaagagccagaagttcattatttatatgaacggacaggtggccgaagtgaagggcagcggcaagaaacagattgagccgggctgcgaaatcgtggtaccgaacaagacgaagaagttcaactttgcgaacatagtatcgaatgcgacttcgtttgcttcactggctacgatgctggcttcactggctacgatgatgaaataacctttaaatctatgagtatatgaacatgaaaatgagactgattgtcatgaacttcctgcagtttgccgtgtggggagcgtatcttacctcaatgggtacgtacctggcgggtgtgggattaggcggacatatcggaattttttacgccatgcaggggattgtgtccctgttcatgccggctgtgttgggtattgtggctgaccgctggattccggcgcaacggttgctggggctgagccatctgttggctgccctgtttatgggtggagcgggctattatgccatgactacgggaccgcaggtggagtttgcaccactgttctcgttctactccgtgagtgtggcgttttacatgcctacgctggctttgtcgaactcggtggcttatacggcgctggacaaggcagggctggataccatcaaggcgtttccgccgatacgtacgttcgggaccatcggtttcatttgttccatgtggctggtagatttactgggattccagtcgaactacatgcagttctttacctgtgcggcatggggcgtggtgctggccgtatatgcccagacgctgccggaatgtccggtgagccgcgcacagggcggacagaagtcgctggtagaggcattgggactgagggcgtttctgctcttcaagaaccgcaagatggcggtgttcttcatcttctcgatgctgctgggtgtgtccttgcagattaccaacggctttgccaatccgtttatcacgagcttcagcgccattccggaatatgccaatacctttggcgtgcagcatgccaacctgctgatttcgctctcgcagatcagtgagacgtgctgtatcctgctgattccgttcttcctgggacgcctcggcatcaagaaggtgatgctgattgccatggtggcgtgggtactgcgcttcggactcttcggcctgggtgacccgggcagcggggtgtggatgttcgtgctgtcgatgattgtgtatggcgtggcattcgacttcttcaacgtgtcgggctcgctgtttgtcgacaaggagacggacctgtctatccgctcgagtgcgcagggactgttcatcatcatgacgaacggtatcggagccacggtgggtacgctgagtgcgcaggcggtggtgaactgcttcgtggacttcaattcgcaggcaccgcaggtggaaggctggagccgggcgtggttcgtgtttgcggcctacgcgctggtagtggcggtgacttttgcactggtatttaaatacaaacataaagtagataacgagtaattagaatgtgaaaatggaaaagaaagacgaatttgtagaaatgcgggtccgtaccattgacgaggccatgaatgtggataaactgatcgggcacctgacatttgatcaggtgatggacgatgaggagaagatggatattatgatgctggacgggcagaacttcaagctgctgctggaggaggtgaacgaaccgcaccggatgatgctggggattatcaaccccgacgaggcggacttgctgtacgcggctgttaacgacccggaaggcacggatgccacgctgccttatcagacggtgcatattctgaaggagctgggtgttaccgtggaaaaggtggtggtaaaggacaaggtgaagttgctgcaccgtgcgattgtgactctgcgcaaggaagacggctcggtgatggagatgcagctgacactgttcgacgcgctggtggtgagtctgatagccggtgttccgttctatgtgaacgcgaagttcctggaagacccccgttcgggctttaccaagtctgtgcctaacacgaaggcgctgctgctgcggttgatgccgctgaaagggctggagcgggagatggaggatgccatccgccgcgaggactatgagtatgcggagctgattaagcaggaaatggcgacccgcaacaaagaagaagaggaagattacgaagatttggaggatttagaaaaagaattgtaattatgcacgtgttttatacaccggatattgcgcagacgctggagctgccggaagaagaagcgggccactgcctgcgggtgctgcgcctgggagtgggcgaggagattatgctgactgacggaaagggatgcttttaccgggcggtcatttcggcagctacgcagaaacgctgtgtggtgaaggtggtggagaaaacggagcaggagcctttctggaaggggcacctgcacctggctctggcgcctacgaagaacatggaccgtatggaatggctggcggagaaggccacggaaatcggtttcgacgagctgacgtttctgaactgccgtttctcggaacggaaggtcatcaagacggaacgggtggagaaaatcgtggtgtcggccgtgaaacagtcgctcaaggcacgcaagccggtggtgaacgagatgacggatttccgccgctttatggagcgggagtttacgggacagaagtttatcgcccactgctatgagggggaaaagcctctgctgcgcgacgtgctccgcaaggacgaggacgccgtggtgctgattggtccggaaggggatttcagtctggaggaagtggcgctggctgcagaaaagggctttcaggcagtgagtctgggcaagtcgcgcctgcgtacggaaacggcggcactggtggccgtacacctgatgaacctgacgcacgcggaataagctgatgtgtaacttttaaatagaatcattatgaaaaagacatggaaatggatgggaggcctggccttgggtatggctttcctgttgtctgcctgcggggaagacaatgcgtacaccaatgcgttgccaaaggatgcggctgcagtgttctcgttcgacctgatggagatggcacagaagtgtgacctgaacgaccaggtgaagcagtcgatggggcagatgatgaaatcgagcctgaagggcagtgcggatgccctggtggacaagctgatggagaacccggaagagagcgggttgagactgaccgaccgggtgtatttctttgccgcttcgcagatggaaatgggcggcgtgctggtgcgcatggccgacaagggaaaactggaagatttgatggccatgcttcaggagcagaaggcgtgtgaggctcctgccgacggtgacggttgccgctggaccgtgggtggcggcggactgatggcttggacggacgaggcgtttctgatgctggcgggcaacggtaacccgaaggacttgcagcatcaggcttcgatgtggttgcgccagaaagaaggggagggctattcgggcactccggaattcaagaaattagaggatgccgacgaggatgtggccatggtgacttcgctgaacgccatgccgaagagttacctgggcccggtgacgatggggctgccggctgacttgaacctgaatgatttaaagatattttctacgctcgatttccaggcgggaagggccgtgatggaagtggagacgctgctggagggcaagttcaaggacttgctgaagaagcaggcggaggtgagcggcgaactggacggcacgtatctgaaggtgttccctgccaatacggtgctctggatggctgccaacgtgaacggtgaaaaggcgtatgagctgttgcgtgagaacccgacggtgcgtcaggagctggacaactcgatgatgccgctcgactttgaggctatcttcaaggcggtgaagggtgacgtggcagtggccatgccggagatgtcgttgaagccgggcttcatcctgtatgccgacgtgaaaaacggtgacttcatgcgtacgtttgaggacctgaaaccgatgctggccatgaccaacggtcagatgcggctggtggacaagggtgaaaatgcttatcagtttgtggttgccaacggtgccatgctgggcatgggccgcggaccggtgtctttctggctgggcgtgaaggatgaccgcttctacctgacgaatcaggaggacctgattggccgtgaggtgaaggggctgtcgctgaaagactgtgactgggccaaggacgtgaaggataagcatttctacctgaacgtgaacttccaggctttgtctgccgttcttccgcagatttcttacatcagtatgctggactacctgagcatcgaatcggatgaaccgaccaaggctcgcctggtgctgcaactgaaggaccacaaggagaatgtgctgaagcagctggtgaagatagtgaataatgaataatgaagaatgaagaatgaagaatgaagaatgccattcattattaattcttcattgaataaaatggacaacatggatttgacttgcggccactttgtaaatccgtttactgatatcgggtttaagattattttcgggcagcctgccagcaaggaattgctcatcacactgctgaatgagctgttggcgggggagcatcgcatagagaacctgatttttctggacaaggaaaatcattcggacagtatggcggatgcagggattatctatgacctgtactgcctgaccgacacgggagaatacatcatcgtggagatgcagaaccgttttcatagtagtttcctggaccgtacgctgttctacatgtgtcgtgccatcgggcggcaagtggagaatctgcgtgagaagaggcggaaggaacgtgagttgcagaccggaaagccggagacggaggaggattttctgctgagtgagccgatgcaggaaaattatgggtccagatacaagctctcgaccgtgtatggtattttcctgatgaacttccgcgagccggggctggaagagaagttccgcacggataccgtgattgccgaccgtgagagcggaaaggtggtgaaccctcatttccggcagatttttttgcagttcccttacttcaccaaggaactcaaggattgtgaaacgctttatgacaaactgatttatacactgaagaatatgcaacattggaaccgaatgccggacgcgctgaaggagcaggtgttcagccgtctggaagaactggctgccgtggccaatctttcattggaagaccgtattgcttacgacaaggcgctggaccgttaccgtgtgagccgcatcgtggaagaggatgcacgtgaagccggatggaagaaagggctcgcggaaggacgcgcggaaggacgtgcggaagggctcgcggaaggacaagctaaagagaaagttgccattgcacgtaacctgaaatcgctgggtttgagtactgctcagatagcccaggctaccggattgaccgaagaggaagtggaatcgacagttaatagttaatagtgaataatgaagaatgaagaattaagaattaataatgaataacgaagagcattcttcattcttcattattaattcttcattgaataaaatggacacaatagaattacagcagaccctgccggaggtattcgccggacgcgacggaatcgtgtcggacgtatggcaccggcagatggcttttcagaaaggaaagatgtatctgattgaagcggcgtcgggcacgggcaagtcgtcactttgcagttttatttacgggtaccgtacggactaccaggggattatcaccttcgacggggagaacgtgcggaaactcacggtgaagcagtggaccgacatccgcaagcgctcgctgggcatgctgtttcaggaactccgcctgttcggggaactgacggcatgggagaacgtgcagctgaagaacgggctgacgggcttctgccgcaagcagcaggtgaaggactggtttgaacagctgggtatcgccgacaagtgggatgtgaaagcggccaggatgtcgtacggacagcagcagcgcgtggctttcgtgcggatgctgtgtcagccggccgactttttcttcctggatgagccggtgagccacctggacgacggcaacgggcagattatggcgcgtatcctgaaggaggaagcggctcgtcagggtgcgggagtgattgtgacgtccatcggcaagcacctgccgctggagtatgacagggtgctgagtttgtaaggtattaacacgaagacggatatgatctggaaattattgaggcagcatatcagtgtggcgcagctggcaggattctttctggccaacctgtgcggtatggtgattgtgctgttgggcatacagttttacaaggacgtgttgccggtgtttacgcagggcgacagtttcatgaagaaggactacgtgattgtgagcaagcaggtgagcacgctgggcagcctggtgggtaagggaggtacgttctcgcgtgccgacatagccgacatggagtcgcagccgtttgctaagcggacgggagcgttcactccggcacagtttcaggtgtcggccggcatgggcatggcgggcatgcagctctctacggcgatgttctttgagtcggtgcccgacgagtttgtagacgtgcggctggagggctggacgtttcgcgaggggcagccggaaatccctatcatcatcccgcgcaactacctgaacctgtataacttcggctttgcacagagtcgcaacctgccgcagctctctgagggcgtgatggggatgatgacgctggacgtgcggctgagcggacggggacggacggagcgcatgaagggacgtatcgtgggtttctccaaccggctgaacacgattctggtgccgcaggcgttcatggaatgggccaacgccacattgggtgacggcgggcagacggctccctcacgactgattgtggaggtggacaatccggcggacgaccgcatcgcgaagtatttcaagcagaaaggctatgagacggaaggcgacaagctggatgcgggaaagacgacgtggttcctgaagatggtggtaggcatcgtgctcacggtgggactgattatcagtgtgctgtcgttctacctgctgatgctgagcatctacctgctgttacagaagaacacgaagaagctggagaacctgctgatgattggtttcagtccggcggcggtggcgcgtccgtatcaggtacttacggtagggctgaacgcagcggtggcggccatgggtgtgctgctggtgtggatggcgcgtgatgcgtatctggacatgctgcggcggatggtgcccgacttgcaggaaggcagtctgctgccggcgctgctgacggccgggggacttttcctgctggtatcggtgctgaatgtgctggctgtaaggcggaaagtggaatctatctggagaaagaaatagtataagcattatatattatctgtaaaaccaaatgaaaatgaagaaactaaagaacgtatggctctttttgagctttatcctgatggtggccggaatggcaagctgtagcacggatgacgaccctacaggggtggaagtatcgaaggaagacattatcggaaattggcaggtgacggcgaatgactggactaactcggaggaagagtcgaaccggaatgaccatgtgggacagacgctctcggtgaagaatgacggtacggcttcgttccgtggcgagtcgttcagctggacgctgagcaagggagtgctgacgctgtcggacaaccgtggccgcaacatacgggtagtaattctgtcgtatacggaggaggagattcaagcttcgtacgattgtacctttgagtcggagatgtataccgaggaaggcaactacaccttcaagcgcgtgtaacgagacatattaatataaagaagagccacagtaatgtggctttttttgtaagacataaagacgaatgtttttagacataagaacataaagacaaaagaatttttaactgtgtaatattatggatatgaaaacagaagaccttattaaggtaattattcaatgcgcatacaatgtaagaacacatctggcagccggttttttagagtcggtgtatcaaaaggcattgttgatagagttaagggaaaaaggtattcatgcggattctgaaacccctataaatgtatattataaagatgagattgtaggggagtttagagcagatattattgtagagggagagataattatcgaactaaaagcggtgcaacatcttctttccatacacgaaactcagctggttaattatttgacggcaactcataaagaccatggattactcattaattttggtggtgaccgtatagaaataaaaaggaagtacagagagtataaacgctcataattttttatgacgtaagcatagaaagatatttcttgaatgtttttggacataagaacataaagtacataagtttatatttacacagaaaatctgttcttatgttcttctgtctaaagcaaaaaggcaacatcctatagcagttattatttttcggacataagcatataagtacaaaagaaagattgcatctacaaaatctgtctttatgttcttctgtctaaaataaaaaagatacacccatatagcacgtcatgttctttgtctaaaatagtatgtgtgaccgcacacacgtgcaatttcctgtaaatatttgtttagatatttcgtctctgtgtaaacaagtgtaaaaccatttgtccgatatctcttgatttatgtctattattaggggaatcagtctaaaaaatgttacatggagttacatatatgagagtttattcagtaaatttgcgttacagaaatggtcaaactttaaacaaatacccgggacgtttgtttaagaggtaagaaccatggatgattcattctttttaaattaaaataattgcttatgtcaaaaatcgttggacacatttcgcaggtaatcggtccggtggtcgatgtgtacttcaagtttgaagaaggacaagacgtggaacacgccttgccgaaaatccacgatgccatgacgattgcccgtaacgacgggcgtacgctggtgattgaagtgcagcagcatatcggtgaagacacggtacgctgcgtggccatggacagtacggacgggttgaagcgcggaatggaagtcgttcctacggggcatccgatttcgatgcctatcggaaaccagatcaagggccgtgtgatgaatgtggtaggtgataccattgacggtatgaaagaactggacaagacggacggatttcctattcaccgtgaacctccgaaattcgaagacctggccactacccaggaagtattgtttaccggtatcaaggtcatcgacctgctggaaccttacctgaagggtggtaaaatcggtctgtttggtggggcgggtgttggaaaaaccgtgctcatcaaagagttaatcaataacattgccaagaaacacaatggtttctccgtgtttgcaggagtgggtgagcgtacccgtgaaggtaacgacctgctgagagaaatgattgaatcaggcgtaatccgctacggtgacgaattcctcaagagcatggaggaaggaaactgggacctttcgaaggtggattacaacgaagtggaaaaatcgcaggtagccatggtgttcggacagatgaacgagcctcccggtgcccgtcagtcagtagccttgtcgggtctgacactggccgaatcgttccgtgaccgccagacgggcgacaacggtccgcgcgatatcctgttctttatcgacaacatcttccgttttacgcaggcaggttctgaggtttcggccttgctgggacgtatgccttcggcagtaggttaccagccgacactggctacggaaatgggacagatgcaggaacgtatcacttctacaaagaacggctccattacttccgtgcaggcggtgtacgtgccggccgatgacttgaccgaccctgctccggctactacctttacccacctggatgccactacggtgttgagccgtaagattactgagctgggtatctatccggctgtagacccgctggactctacgtcgcgtatcctcgacccgctgattgtgggcaaggagcactacgaaaccgctcagcgcgtgaagcagattctgcagcgcaacaaggagcttcaggatattatctctatcttaggtatggatgaactttcggacgaagaccgtctgacggtgaaccgtgcccgccgcgtgcagcgattcctttcgcagccgtttgccgtggccgagcagtttacgggcgtgccgggcgtgatggtttccatagaagacaccatcaatggattcaagatgattctggacggcgaggtagactatctgcctgaacaggctttcctgaacgtgggtaccattgaggacgccatcgagaagggtaagaagctgatggaagcggctaagagttaataagtaaaagttaaaagttaaaagctgatagcttaatatgaaagaacttcatctggttatcgtttcacccgaaaagctggtttacgaaggtaaagtgagccaggttacctttccgggaagcgcaggaaaatttcaggtcatggccgaccatgccccgattatttccacactctcggccggggaagtgaaatacgtggccggacaggaaacgcaatccctgcaaatcaaggggggattcgtggaagtcaaggagaatcagatttcagtctgtgtggaactctgagaggagcgaagcaggcgatgaaccgaatatgtttttggcggctttccggatgaaaaaccgcacgatactatgtttttgttgaccgttaagaagaaatttataaaagaactgaccgtgattggaatcgtgctgacgacgctcgtcgccgtggtatatcatctgttcattcccgacaggtatttcctgtggtttccggccattccgatattcttctatcttttcggcctgttttacatagaaatgttcgcgttcaactatcgcgtggggctggaacggattgcgatgacgtatctggtgtgcaaggtgctgaaattcattgtcagtgccatgctgctgatgttctacggatttgtgataggacatgaagtggtggcgttcatgctgaccttcatcttcttctactttgcgtttctgatattcgaaacccgttttttccttctttttgaagcgaaactcaaactaagaaaaaaagctaatgatgaaaaaaatacggtacataatcatcacgctgttactgctgatggcggttccggctgcgctgacgaaggcacaggccgctgagggtgacatcgacgtgaacgaactggtgttcggacacattggcgatgcctaccagtggcacattgcgaagttcggcgatgcggaggtaagcattccgctgccggtgatcgtgaaaagcagtacgggctggcatgtgttctcgtctgcccggctggaggaaggtccttacgagggactgtacgtggccgagggtggtgcctacgacggcaaaatcgtggaacgcaatgcggccggcgaggaggtgcgtccgctggacatctccatcacgaagaatgtgctgggcttgtttatcaacagtgcggtgctgctggtcatcatgatgagctgcgtgcgctggtacaagaaacatccgctggaagacggggcacccaaggggggcgtcggcatgattgaggccacggtgctttctatctacaacgacgtgattaagggctgcatcggcgagaattaccgccgctacgcgccttatctgcttacggcgttcttcttcgtgctggtgaacaacctgatggggctgattcctatcttccccggaggtgccaacgtgacgggtaacatcgccattacgctggtgctggctttgtgtacgttcgtgctgaccaacgtgtatggtacgaaggcttactggaaggaaatcttctggcccgacgtgcctacgtggttgaaggcgccgattccgatgatgccgctgattgaattcttcggtatctttaccaaaccgtttgcactgatgatccgtttgtttgccaacatcatggcaggacatgcggccgtgctcagtctggtggccattatcttcatcacggtgaagtcgggtccggttatcaacggctcgatgacggtggtgtcggtggcattcagcattttcatgaatgcgctggaaattctggtggcattcatccaggcatacgtcttcacgatgctgtcggccgtgtttatcggtctgtcgcaggtgaaggaacatgccgaaaaataattgattcaaagaaaattaaagtataaccttttaaaacaagaaaattatgttattgtcagttttattgcaggcagctgcaggggtaggtattagtaagttgggcgccgctattggtgcaggtattgcagttttgggtgccggtatcggtatcggtaaaattggtagctcggccatggaaggtatcgcacgccagccggaagcttcaggcgacttgcgtatgaacatgattatcgctgccgctctggtagaaggtgtggcactgattgccatcgtggtttgtttgttgactttgttcttgtaaaaaataaaacaataagttatgggattattaactccggatccggggctgctgttctggatggtcatcaccttcggagtcgtgttcttcatcttggcgaaatacggcttcccggtgattctgaagacggtggaggaccggaaagcatacattgacaattcgctcaaggcggcgcgcgaggccaacgaacagctggccaacgtgaaggtggagggtgagaaaatcctggcacaggcacgcgaagaacagcaccgcattctgagtgaggctgctgctacgcgcgaccgcatcatcaaggacgctcaggagaaggccttcgccgaaggcaaccgcctgatggaggagatgaagaagcagattgaaacggaaaaggaaagtgccatccgtgacatccgccgccaggtagccgtgttgtcagtgggcattgcagagaagattatgcgcaacaagctggccgatgaaaaggaacaggctgcgctgattgaccgtctgctggatgaaatgattgaaacttctaaaaaataacgtgtcatgaatacaggagtcgtttcaagacgtttcgcgaaggcactgctggcatacgcgaagggtgaagggctggaagacaaggtgtacaaggaggtgaagactctggctgcacactttgccgaagtgcccggcctgcggcgtgccgtggaaaatccggtgctggagagaagcaagaagctggagctgctttgcgaggcttcgggtggaaaggacgtgagccaggtgatgacgcgttttctcagcctggtgctggaagacagaagggagaagttcttgcagttcatgatgtggtcgtacatcgacctgtatcaggaagacaagcacatcctcatcggaaagcttaccactgccgtcagttcgcccaagctcgtggcacacttgcagaaactggcttccgagaagacgcacggtgaggtaatcctggaagagaaggtggacaaaggcctgatcggaggatacatcatcgaactgggtggcttccgcctggactccagtgtggcgaaccagttgaagcgcgtgaaacagcagtttatcgcgaaaaacaggagaatagtgtaaacaatgaataatgaataatgaaaaacgattcctattattcactgttcatttttaattgttcattattaattattaattaaaaagaattatgccagaaaatacaataaaacccagcgaagtttcagaggtgttgctccaacagttgaaggggattgacaactcgctgaaattcgacgaagtgggtaccgtgcttcaggtgagcgacggtgtggcccgtatttacggtttgcgtaatgcggaggccaacgagttgctgcagtttgaaaacggtatcatgggaacggtgatgaatctggaggaggacaacgtgggagcggtgcttctgggtccgaccgaccagattaaggaggggatgattgtgaagcgtaccaagcacattgcttccatcaacgtgggagaagcgatgctgggacgtgtaatcgaccctctgggtgtgcccttggacgggcgcggcgaaattggcggagagctgtgcgagatgccgctggagcgtaaggcaccgggggttatcttccgtcagccggtaacggaaccgctgcagacgggactgaaggctatcgatgccatgattcctatcggccgcggacagcgtgagttgattatcggcgaccgtcagacaggtaagacggccatcgccatcgataccatcatcaaccagcgtgccaactacgaggcaggaaatccggtgtactgtatctacgtggccatcggtcagaaaggttctaccgtggccagcatcgtgaatgcactgcgtgagaagggggcgatggactataccatcgtggtggctgctacggcttccgacccggctgccatgcagtatttcgctccgtttgccggagctgccatcggcgagtacttccgtgacaccggccgtcatgcactggtggtgtacgatgacttgtcaaaacaggctgtggcctaccgtgaggtatcactgattctgcgtcgtccgtcaggacgtgaggcttatccgggtgatatcttctacctgcactctcgtctgctggaacgtgcggcgaagattatcaaccagcaggaagtggccgaacagatgaacgacctgccagccagcctgaagggtaaggtaaaggccggaggttcactgaccgccctgccgattatcgaaacacaggccggcgacgtgtctgcctacattccgaccaacgtgatttccattaccgacggtcagatcttcctggaaaccgacttgttcaaccagggcttccgtccggctatcaacgtgggtatctctgtatcgcgtgtaggtggtagcgcccagataaagagtatgaagaaagtggccggtacgctgaagattgaccaggcacagtatcgtgaactggaggccttctcgaagttcagcagcgacatggactctgtgactgccatggccatcgaccgtggacgtaagaacaaccagctgctgattcagccgcagtactcaccgatgccggtaggcgaacaggtggccattctgtactgtggtacgcacggactgatgcgcgacattcctatttcgaaggtacgtgccttccaggattcgttcctcaccagcttgcgtgccaaccatcaggccgatgtgattgacgtactggcagccggaaagatttccgacgaaattaccgcaactattgagaaactggctgccgaagtggccggacaatttaaagcataaatcccatggcatcactgaaagaagttaaaggaagaatcaactcaatccacggcacgctgaagattacttcggcgatgaagatggtggcgtcttccaagctgcacaaggcgcaggaggccattgaaaatatgcttccctacgaacgccggttgcaccgtatgctcagtaatttcctgggcgcggagctgagcgtggaatcgccttttgcagtgaaacgtgaagtgaagaaagtggccgtggtggtgtttgcctccaacagcagtctgtgcggcggattcaatgccaatgtcatccgtcacctgaacgaggtggtggcagagtatgagccgaaggtgggccgtgagaacatcctgatttatccggtgggccgtaaggtggccgatgcggtgaagaagatggaaggactgacggcggccggcgattatcagcacatgagcggaaaaccgaactatcaggaggcggccgatctggctgccgagctgatgacgcggttttccagcggtgagattcagcaggtggagctgctctacaaccacttcaagtcgacctctacgcaggtattgacgcgggagacttatctgccgctcgacctgagtgccggtcatacggacgagaatggggaggaacaggaaaccatgcaggccgattacctcatcgaaccgtcgccggaacaggtgatggaggagttgctgcccaaggtgctccgcatgaagatgtacaccgtgctgcttgactctacggcttcggaacatgccgcgcgcaccatggctatgcagattgccacggacaatgcaaacgacctgattcaggaactgaccttgatttacaacaagagccgccagcaggcgattaccaacgagttgctggacatcgtgggcggcagcatgagctgaccccacgggcggaactcttgtgttcattgcataaaaaaacgtatcgctgtctcacggcaggatacgtttttttttgaacgaataaactaaaaaattaattatcttaaaaaagaaaacatgaaattctttggtgatttatttctataacaaactgatttcgtgttttgttcgctttatctgtcggtttttctttactgattttttaataactataaaagcatacagccgcaccgtcgagcaggcattccattcgtccttctcccaggcggatattgtccatgtaggagtagtcgccccggccgtagttcaaccggatgctggtgtagaaagcgtcgtaccagtcccacgtaaaggtgtaggtatattcctcccaacgtccgcgggcatcctgaatgcggataaagtcttcaccggttccgttggtataaaaacgcagcacctgaaagtggtgcaagccgtagtcgtcgtaccagtcgtcctgccagtcgtagctgcagagatacgctgtgcgttcacgatattccagggtgttgttccctaattccatttccacgttacacgacgggaaggcgagtgtcagtgcgactagcatcgccatatacatgaatttttttacccttgttctcataactctttgtgtgtttgttttcctctatgtgacaaaggtatccggaaaaaatcatacaaacgaatgatttttcctattcctgtgggggaatttccctatcggaggtagggaaatgcatcggtctgcggggtggcagatggtgtatcgcctttgtggctggacgggaatgccggtgtatttaacgcaaaacgtccttgcgttcggattgaaacacaaggacgttgtatggaaaatttctttacgttatgaatgaaacgcaaggacgttttttcaggatttctggagaagtaccgtcagtgcatcgcgccagtcttcaccgttgcgtgggcagtaggtttggaaacccagctggcgggctgcctgtacgttgcctgccccgtcgtcaatgaagagcgattctgacggaagaatgtcggtatcggctatcaggaagtcaaaaatctgccggtcgggcttggtcactccaatctggtaggagaggtacagcttgtcaaaatagtcgctgagcggtttcccctttgacgagaatgccggactgcaggcccagtccatcacgtagggattggtgttgctcagcacgaagagcttgtagcgcttgcgcagctccttcaggcagtcgagcagacgctcgtccagtccggtgaagtagcccagccatgcctggcgtgtctcctcccagctgggtgtgcgtccgccgcacaactgtcccagtttcacctggaactcatcgggcgtaatttttccttcttccagttcctggaaaatccccgtctggtgatatttgtccaggcgctggtcggcatcggccacccctaactggcggaacgcttccaccgcctgttcgcggctgataggggcgatgacccctccgaaatcaaaaatcaggttttttatcatatattgtttttattttctcagcatcaggttcttgaacggggcaggatagggagtctcaaattccatccgttcgcccgtaagcgggtggtagaagcacagcttgaaggcgtggagtgccagacgtccgagcgggtcggtttcgcagccgtaacgcgcatcacccaccaccggatggccgagcgactgcatgtgcacgcgaatctggttcttgcgtcccgtttccagttgcagctccatgagcgaatagccgttggcccgcttgatggtgcggtagtgcgtgatggagagcttgcctccgtcgtctaccggcgaggagctgacgtacagcttgcggtcggtaagccaggagcgtacggtgccctggtctttctccatgtcgcccatgacgatggacacgtagcggcggtcgtacacgatgtcgtgccagttgtcgcggagcgtgtgctgcgtcttttcatccttggcatacatcatgatgcccgaggtttcgcggtccagacggtgcaccacgaagatgcggttgttgcggtgcgtgcgcttcacgtactcattcagaatgtgctgtgcggtacgttccttctggtggtcggtagccacggacagcagtccttccttcttctccaccacgatgagataggcatcctcgtagagaatcttcagcatggggtggcggaactcgtgcttgttcttttcacggctcacctgcaccttcatgcccggtttcagagggaagttgtactgcgtctggatgttgttgtccaccagcaccacgcggttggccagcaaggcttttacgcgcgtgcggctgatgccgtccatcttcttcataaggaactccatcagttccgccggttcattgaccggatagattgtatatttggctgcggcacgcgggatagggcgtcggccgttgttgccagagttgtttcttgccactttgttgcgtcagttaaaagttagaagataggggagaggtttagcgtctttccagttgcacgacattttccacgtgatgcgtgtgagggaacatgtcgacaggctgtacggcagtcaccttgtacttgccgtcgagcagctggaggtcgcgtgcctgtgtggccgggttgcagctcacgtagacgatgcgtttcggctcggcagccagaatcacgtcgattacgtcattgtgcataccagcgcggggagggtcggtgatgatgacatccggacgtccgtgctccgcaatgaagtcgttggtaaggatgtccttcatgtcgcccgcatagaacagcgtgttgtcgataccgttcagggccgagttcaccttggcatcctcgatggcttcgggcacatattcgatgcccaccaccttgcgtgcctggcgtgccacgaagttggcgatggtacccgtacccgtgtagaggtcgtacaccagctcgttgcccgtaagtccggcaaactcgcgtgccaccttatataaattataggcctgttcagagttcgtctggtagaacgatttcggtcccaccttgaagcgcagtccctccatctcctcgaagatgtggtcgttgcccttgaacacctccacgtcgaggtcgccgatggtatcgttgcacttgttgttgatgacatacatcagcgaagtaatctgcgggaagctgtcggccatgaactgcagaatctcttccatcttgcggcggccttcgtcgtcggtcaccttgcactgcagcaccaccatcagttcgcccgtagacgaggtacggatcatgatgttacgaagaaggccttcctgcgtgcgcaagtcgaagaacgggaagttgtgcgcgtaggcatagtcgcgtacggcattgcgaatttggttggaaatgtcgtcctgcaaccagcacttgtcgatggccagcaccttgtcgaacgcccccggaatatggaatcccacggcattcatctggtcgtatttcacatcctgcttcacctcctcttccgtaagccagcgcttattggagaatgtaaactccagcttgttacggtaaaagcgggtcttttccgagcctaagataggacggaattccggcagttccaccttcccgatgcgggtgaggttgtcgaacacttgtttctgcttgtacttgagctgttcctcgtaagaaagacattgccatttgcatcctccgcacactccgaagtgactgcagaacggctccgtgcgcaggggtgatttctcatggaactttaccgccaccgcttcggcgtaatggttcttcttgcgcttcacctgtaaatcgactacgtcgcccggcactacatacgggacaaatattaccaactcgttcactttagccacggcttttccttctgcggctacgtctgttatcgttaccttctccagtaaaggcagttcttttttctttcttgccacgttcttttcaataaaaccaatttgggagcaaatttatacatttttcctgacattcttccatgtttttcgaagaagttcattttgcaaactcaatgttgcaaaatatgtcgaaaaatatcttcacaaaatttgggattcaataaaatatatatagatttgccagcggttgaccaacgaaaaacattattgaaccttatcaaatataagaaaacatggaaaagaaaagagtctatacttttggaaacggacaagctgaaggaaaagctgacatgagaaatcttctgggtggcaagggcgcaaacctggccgagatgaacctgataggggtgcctgtacctcccggattcaccataacaaccgaagtctgcaacgaatattttgaaaaaggaaaagaagcagtggttgcgctgctgaaagacgacgtggaaaaatccatcaagggagtagaagccctgatgaagtcgaagttcggcgatgtggaaaatccgttgctcgtttccgtacgttcgggtgccagagcgtccatgccggggatgatggacaccattctgaacctgggtctgaacgatgaagtagtagaaggactggctcgcaagactaacaaccctcgctttgcgtgggactcttaccgccgcttcgtacagatgtacggcgacgtggtgctgggcatgaaacccgtgaacaaggaagacatcgacccgtttgaagccatcattgaagaagtgaagaaagccaagggcgtacgtctggacaacgaactcgacgtggacgacctgaagacactggtagtccgttttaaggaagccgtgaagaaacagaccggacaggaattcccgtcatgtgcctacgaacagttgtggggtgccatctgtgccgtattcgattcatggatgaacgaacgcgccatcctttaccgtaagatggaaggtattccggcagagtggggaacagccgtaaacgtacaggccatggtattcggtaacatgggtgagacttcggctacgggtgtatgcttctcacgtgacgccgctactggtgaagacctgtttaacggtgaatacctgattaatgcgcagggtgaagacgtagtagccggtatccgtactccgcagcagattaccaagatcggttctcagcgctgggccgaactgcagggtatctccgaagcggaacgtgtggccaaatatccttctatggaagaagccatgccggaaatctacaaggaactcgatgaactccagactaaactggaaaatcactaccacgatatgcaggacatggaatttaccgtgcaggaaggcaaactctggttcctccagacccgtaacggtaagcgtacaggtgccgctatggtgcgcatcgccatggaaatgctgcatcagggcatgattgacgaaaagaccgctttgatgcgctgcgaacctaataagctggacgagctgttgcatccggtattcgacaaggaagaactgggacgtgcccgcgtgctgacacgtggtttgccggcttctccgggtgctgcctgcggacgtatcgtcttcttcgccgaagatgctgctgaatggcataccaacggccatcgcgtggtactggttcgtattgaaacttctccggaagacctggctggtatgcaggctgccgaaggtatcctgaccgcccgtggaggtatgacctcgcacgcagccgtagtagcccgcggaatgggtaagtgctgtgtatcaggagccggagccatcaacgtagactacaagacccgtacggtggaaattgacggagtcgtactgaaagaaggtgactacatctccatcaatggaaccaacggatatgtatatgccggagaaattccgactcagccggccaaactgtcgggcaactttgccgaactgatggaactctgcgacaaatatgcccgcctgaaagtccgcaccaatgccgacacgccgcgcaacgcacaggatgcccgtggattcggtgccgtaggtatcggtctgtgccgtacggaacacatgttcttcgacgacgaaaagattgtggctatgcgcgaaatgattctggccaaggacgtagaaggccgcaagaaagccctcgacaaactgttgccttaccagaaagccgacttcaaggaaatcttcaagaccatggacggactgcctgtcaacgtacgtctgctcgacccgccgttgcatgaattcgtaccgcacgatttgaaaggtcaggaagaaatggcacaggccatgggtgtgaccgtagattatatccgccagcgcgtggaaagtctgtgcgaacacaacccgatgctgggtcaccgtggttgccgtctgggaaatacgtatccggaaatcaccgaaatgcagactcgcgccatcctgggtgctgcctgcgaactgaagaaggaaggttacgacccgcatcctgaaatcatggtgccgctgattggtatcttgtatgaattcgaagcacaggaaaaggtgattcgtgaaactgctgccaaactgttcaaggaagaaggcgtggaaattccgttcaaggtgggaaccatgattgaagtaccgcgtgctgccctgactgcagaccgcatcgcttcacatgccgaatacttctcattcggtacaaatgacctgactcagatgaccttcggttactctcgcgacgatatcgcttccttcttgccggtttacctggaaaagaagatcctgaaggtagacccgttccaggtactcgaccagaacggtgtgggccagcttatcgaaatggcggtagccaaaggccgttccgtacgtccggcactgaaatgcggtatctgcggtgaacacggtggtgaaccgatgtccgtgaagttctgccacaaggtaggtctggattacgtgagctgctcaccgttccgcgtgcctatcgcaagactggctgcggcgcaggctgtgattgaagaaagtttgtaagccttaacggcttgttgatatagtactcaggctgtagctttcccgcgaggagcggggagttacagcctgaacttgtacttgaattataaaacgtataaaaacggagggaacgttatacttttttcatgtgtattgaataacaataatgaaagaaacttctataaataaaaacagaattcagagataagaagagacttacaactgaatcctgtttccatttacacaaaattttggacagtgttaaggactgtatcattcatgctttcatagattgagtgtcttatataaatcaaatagctttttgctaagtcgtgttgtgtatcttatattgatgggtaataaactgccttcaaaaatttttgattgatgtttagagtcttcacattttaccattcctatatatttacataatttttcaccaataggagatactgcatctgctataactttggagaaatatatttctcttttaaacagttctataatgagtagtattaatgcatcgtataagagtttaaaagcaccagaattatgatatttaggatgcagggctacagaacttatatatagaagtgatttaaacttttcttttccttgcacattttctcaatagcataatggaaaaagcgatgtagttccatgattcccagttt

SEQ ID NO: 3775 - DNA, 22687 bp, Unknown
  gut microbiota DNA sequence
attattatagattcatttatctatattttattattatagattattttacctataatcattggcgaaataaaagaaaattcatacatttgccatcgaatcaatgaaccataatatgtttgcaacaatttcagcagatatagtagcatccacttccttgtctgtgaatgaaactataggattaaagcaaaggatagaatcattatttggcttgctaaaagtgagttatcctgattttgaaggtcgccaaatcaaaggggattatatagagtgcgtaatgcaaagtgtatcaaacgtattccggatagcctttataatcaaatcctgcatcaaatctttttccacagctaaaaatgaaaagacgaaaaatttccatacatacggaataaggatggctattggtatcggagatatgagaatagtggataccgaacaaggcatttgggatggtgaggccatatatctgtcaggacgtgcacttgaggaaatgagttccttaaataagggaaccatgtctgtacaaacaagtaacaagcaattatctgccccattacaaactatagccctattggccgatgccatattaaatgatatgactgtgcgccaaagtgaagtcgtttactataaattgcttggtttcaaagaggcagacattgctaagaaattgggtatatcccaagccagtgtaaataatgcttctacagccacaaaatggtattgtatagaagaagccataaaatattttgaacaggtaaattttgaggaatatgaatagttggttattcttaagtctgatattggcacatgtcataggcgacttctacctgcaaaatgataaatattgtacacagaaagaggaaaggaaattcaaaagctggttcctgtatgtgcattcgcttattatcggtgtggtatcatgggtagttgttcctgtttatgaattcagattttatgcccttgccattgctttttcccatctggtgatagatgttatcaaaacatatagcccaaaaggattatggaattttgtgattgatcagattgttcattgggcgatattgattatagtgacatcttcctttgacactacaacaaagctaccaatccaatcaatggattgcaatggcagcttctcaatacctctgttcatattagcgatattattgtgcatcaagcctgcaaacatcctgattaagttggtcttaaaaaaatatcaagttggagaaacacaatcctgtgaaaacatcaaaaatgcaggagcgttaattggaaatttagaacgaattcttaccatcatattcgttatccttgggcaatatgaagcaatcggttttatcatagcggcaaaatccatacttcgattcaaagacacggatacagcaaaaacagagtatgtccttgccggaacgtttctaagttttggaattgcattgctgtgtggtttaatggtaacaaaataacagatggacagttttcaagagaaatacaatgcgcttgtcattaaatacaatgctctgcttgccgaaaatgaagaactgaagtcaatactttcacagcatggtatagtgtattccaccatcaaatgtgctgatgaaagcacagcattttcttccataatatatcctccaatcaaactctctattgatgagaaaattgcattgttccgtaactttttcaagggacgagatgatgtatttgcacgacgatggttcagcaaaaccacagaaaagggtggttatcaacctgtctgcatcaacgaatggcgtagaggaatatgtgacaagaaaaagcataaatgcgcagagtgtcccaaccgcaattttgccccgttaaccaatcaagacatataccgacatctggaaggtaaagatgagaacggatgtgatgttatcggtctgtacgtcgttaattctgataataaatgttctttcctgtgtgctgattttgatgacaaaaattgcactcatggatataagaacgacgtattggcatttatttccatttgtagagagtggagaattccgttcagtatagaacgctcacgctctggctctggcaatggtgcgcatgtgtggactttctttaatgaacccataccggcctgcaaagtaaggaaattaggcaatacaattcttacggaagccatgaagcgcaatggacggattacattcgattcatacgatcgtttctttcccaatcaggataaagtaccggaaggcggattcagcaatctcattgcgttaccattgcagggaaaagccaggaaagcaggaaacagcatttttgtagatgatcagtttctcccgttccaggatcaatggacatacctatacaatgtaagaaaaatagatgaagataccgtagatgcattattgacacagcatcagcaggaagattttggaacattggccacatcttcggaaaataaaccgtgggaaataccagtcgtacaagatgtgagccaggaagactttaacggcagacttataatacataaatcagacaggatatatattcctttaaagtctatttcagataaggctagtaatcatttgaaacatattgcggcgttcaaaaatcctgaattttacagcaaacaagcgatgcgtatttccacatataacattcctcgtattatctgccgtgcagattttaccgatgaatatctggcaatgcctcgggggtgcgaggatgccattatcgacatactgtattccctcaaaattgattatgaaatagttaataatacaaatcatggtaaacctattggcgtaatattcaaaggaaaggaacgcgatgaacagttggatgccattaatgccctcatgccatattccaacggagtgttgtctgcaacaacagcctttggaaagactgttacagccgcggctctgattgccagaagaaagacaaatacacttattctggtacactccaaggcattgcttatgcaatggcatgaatgtctgtctgaatttcttgacataaattttacagaagaggagatttccaagaaacgaggcaggaagaaggctttttctccggtcgggtgtcttgattctacctctaacacgttgcatggcgttattgatatagctcttatacagtcatgttttgacaatgacgaagtcaagccttttgtaaaagaatacgggatggtcattgtggacgagtgtcatcacgtatcttccatcacattcgagaatgtattaaaacacgttacggcacattatgtctatggacttactgccactcctatccgcaaagatggtttgcagcctattatcttcatgcaatgcagtccgattcgtttttttgccgatgccaaggcacagatacagcagcagtcgttccagcgttatcttgtgccgagatttacatcttacagacctgttaccgatgataaacaatcgtttacggcactatcacaatccctcgcagaatcggaaatacggaataatcttataatagaggatgtccttaatgttgtggctgcaggccgaacacctataatacttactgccagaacttctcatgtagaattgcttgccgaaatgttgaagcagcatgtagccaacatcatacaactcacaggagaagggactgcaaagaacaagagagaaacgctgcaaaagttacaggatatacccaaagatgcccctcttgtaatagtagccacgggaaaatatgtgggagagggatttgactatccacgacttgatacactgtttttggcactaccaatctcatggaaaggattggtggcacaatatgccggacgtttgcaccgtgagaatgagggcaagaaagatgttcgtatttatgactatattgatatacacgaacctgtttgtgagaatatgtatcgtaaacgcctaaaaggatactctgccatcggttatcgtgtactgtcaaaagatactcagacactgtttgataatacagatgacttacaaacatcatcatatgaaggacagattttcaatggtaacacattccgtttggcatttatgcaaaatttgaaaagttcaagacaatctattgtcatatcctctccaaaactctatcgtacagaacgaaacacatttgttaaaatgctcagagagtttcatgtaagtggtgttcaaattgcaattcttacatcagaggaaagcagtcagacgaattatctaaaaagtttaggattatatgtaaagattgtacctaaactatctttatcctcgtgtatcatagataggtccacggtctggtatggcagtatcaatatacttggctatgtaacagaagaagataacattattaaaatcacagatggtaaacttgcaaatgagctacttgatatcatgtacgatgaacatatgaatccacgtggttctgacattcgtatatcccattaaatatttaatggcatccattttccagcaatagtgaagaaatacgatggtgaaagctatggaaaattttggacagtgtcttatattatgacgaattcttggatgacacagaaatagaataataaactacccaagggacgaatagaaaaacgctatgtcttcgtcatcttttatgtaagatacttgattatttttctctgctatttgctttaattgttgtctttctttatcactccagttattgaaagccttcaattttgaaataacaaaatgagtccgcgcaaaactattactgttttccaaatccaatatgagtttttctttttctttaacttcttgaacctctacatttatattctgattgagctgctccttttgatttttataatgaaaagacacaagtttttcatttgaagccgtttgttcaattatagtttttacgagaatatccaattctgaattttctgtataatctgccggagcaaaatatttaatccttttatcttccatcattttgtacacttttctcttatcttgagtttccggattaaaaactcctattgaatggccggaattggtattaataagtttcatacatggcatatcagtatcgctgtcacctatataaatcatgtttctaaaaggaatacgaatattctcgggctcaaaataatcattgacggcgaaatcatttacatccaatgttcctttttctattctaaaaagaaattgtgtcttgcttgtataatttataacttgtgcaggccactgagctacaccatctttatcataataaaatgaactagcatagattttctcaaattcatctgcaaccttagttccttcaatcatttctttcagcccagaagatatgatgtaatgttccacaattacccccttactttctccatattccctgattcttttaaaccacgtatctacaccaggaaataactttactttcgctccataatccattaaggcctctctgttaaaaacaaactttccatgagctttttgaatcattgtaaacatataggcaaggttttggtccatgtcgttttcttcagccaatccgttcgattctttccagaaagactcgacttcatatccaaccgattgaatatacccttgagcctgcatatcatcaggagacaacgttttatcaaagtcgtaacatattgctactactggtttatcctcttttgactttcttaaaaattccttactcataaatgtcatatatataaataaaaaaatgaggcataatccttataatcatgcctcatttctattattttattctttatttcacttcctcaaagtcagcatcctgtacattgtcattgttcttgcttgaaccctgacttgcattgttatttgcctgacctgcgttaggaccagcctgagcaccacctgtctgagcgtacatttcagcacttgcggcctggaatgcagcctgaagttctgcgcttgcagcatcgataccagccaaatcctgagccttgtgagcgtctttcagtttctgaagagcagcttcgataggagctttcttgtcagccggaatcttatcgccaaggtctttcaactgattttctgtagagaagatcaagctgtctgcttggttcaacttgtcgatgcgttccttttctttcttatcagcttctgcattagcttcagcttcagctttcatacggtcgatttcttccttgctcaaaccagatgaagcttcgatacggatagcttgttccttacctgtagccttatccttagcagaaaccttcaagataccgttggcatcgatatcgaaagttacttcaatctgaggtacaccacgacgagccggagcgatacctgtcaggttaaactgaccgattgacttgttctgagcagccatcggacgttcaccctgcaatacgtggatggtaacttctgtctggttatcagctgcagtagagaacacttcgctcttcttgcacggaatggttgtgttggcatcaatcaacttggtcattacaccacccattgtttcgatacccagtgtcaacggagtgacatccagcaatacgatgttacctacaccagcttccttgttcaatacggcaccctggatacaagcacctacggctactacttcgtccggatttacacccttagaaggaactttaccgaagaagtcttctaccagtttctgtacagcagggatacgtgaagaaccacctaccaggattacttcgtcgatatcagagttgctcaaacctgcatcgctcattgctttcttacaaggttcaagacaagcctgaatcaagttgtgagcaagctgttcgaatttagcacgagttaaagtcttaaccaagtgtttaggcacaccagctaccggcatgatgtaaggcaagttgatttcagtagaagttgaagaagacaattcaatttttgccttttcagcagcttccttcaaacgttgcatagccatcggatcagtagtcaggtcagcaccttcgtcgttcttgaattcctgaaccaaccagtcgatgataacctggtcgaagtcatcaccacccaggtgagtatcaccgttagttgacaatacttcgaatacaccgccaccgaattccaggatagagatatcgaatgtaccaccaccaaggtcgaatacggcaaccttcatatctttgttagccttgtctacaccgtaagccaatgcagctgcagtcggttcgttcacgatacgttttacatccagaccagcaatctgaccagcttccttcgtagcctgacgctgagagtcagagaagtatgccggaacggtgatgacagcttctgttacttcctgtcccaaataatcttcagcagttttcttcatcttctgcagaatcattgcagagatttcctgcggagtgtacagacgtccgtcgatgtctacacgcggagtgttgttgtcaccctttactactgaataaggtacacgagaaatttctttctgaacctgatcgtaagtttcacccatgaaacgtttaatagaatatactgtacgtttcgggtttgtgatagcctgacgtttagcagggtcacctaccttacgttcgccgccgtctacgaaacctactactgaaggagtggtacgtttaccttcgctgttggcaattaccaccggttcgttaccttcaaatactgcaacacatgagtttgttgttcctaagtcaataccaataatctttcccataattgtatctatttttattattttctaatttggtttattctgtaacgccgaaacgttacgccctttaaaagacaaatgccatgccagaacacaaaaaagcccgtgccagcatttttttctgacacggactgccattttggctgttttatgtgacattcttgtctcacacattcaggtgagactgacaaaatcagaggaactcaccccagaaaggagctgacaaaagaggttctgtcaggaaaggaatctggaagaacaacacaattcctatggccagggcaatcatccacaacaataccagcactactttcgtagaggtgcccatgggcttccagctaccgaacgactgcatgacggcctgaatcagtccggctaccgggataccgacaatcagcagaccacatacggtgagcccgacaatcattcccggcatggtgcacacaccaccccagtctacccaaggcaatatattatagaagaaggcaggcagactgacgatgactcccgtggcggccatcagcagggcaaacaagacgatgagtcctaccagtaggaaaggagcgcagcatatcagcaacaacaccaggcaaagtttcagcaggaaaccgaccacggctaccaccccattgccaaacttatgcaaggcagagcggggctgttctgaatgaacatattcgttcaccttttcaaaaccgtcggtcactgtccggccgatgttttccacattgatgggttctccgcgcatctgcaacttttccgtagccgtatgtgccagcgggatgataatccatgccaacagataagccagaatcaaaccatgaataaaaaatccggccaaaataaagacgatgcgggtccaagtcacatcccagccgaaataagctgcaatgcccgataccactccacccagaatacggtcgtccggattacggaacaagcggcggcgagtttccgtcgattcgctatcgaaagtcttgctgttcgatgcagacgggttaccgtcttcttcgccattcagttcctccggctttcccatacgggcaattacctcttccacctctttaatagtaattacctgtaatccgccacgcaatgcctcatcaaacagttcggcaatacgggattctatgtcgcgcacaatctcttccgctccttcatccttacggaaatggtagcggaggttgttcaaataattatccagcaggatataggcatcttcatcaatatgatatacggtgccacctaaatttacagtcagtgtctttttcatgtcatgtgatttttaaatgttttgtcttaaatgattcaccgtgtcggaaagtccgtcccaggcactttccagttctttcagaaattcctccccttccggagtcagtccataatacttgcggggcggtccttgcgtggactccacccactcgtacgacaggagtccgtcgttcttcaggcgggtcagcaacggataaagcgtgccttccaccacaatcagccgggcctctttcagcttctggataatgtcggaagaataggcagactcccggtgcaacagcaacagaatgcaatactccagcattcccttgcgcatctgcgattttacattgtctacattcatttcatctcatttatcttgtatgacacaaatataggttttacattaatactatgtattacaaggtattataatttcaaaacttttaacaagtttatgtttcgataaaacccatacatacaaaagataaactacttttgcagaaaacacattataaaaaggaaatgcctatgtttacgattaaaaaagctactcttgcagacattgaagtcatccggacgctggcgacacagacctttccggctacctaccagcacattctgactccggaacagattgattacatgatggactggatgtattccagcgagagcctgagaaaccagatggagaaagagcatcacatttactacattgcttacgaggaatgtgagcctgcgggctatgtgtccatccaacaggaggatacggatttgtttcacttgcagaagatttacgtactcccctacttccagaaatacaaactcggacggcaactgttccagcaggctataaagggcatcaaggaacttcatccggaaccttgccgcatggaactgaatgtgaaccgacagaatcctgcacttggattctatgagcacatgggcatgaaaaaggttcgcgaaggggactttcccatcggcaacggatattacatgaacgattacatcatgggcatggacatctaaggctccccgccgccgttttcatctctttgctttgcagacgggggattacttctacagcttgcaaaacaaagaaatgaaaaacggcacggacatgtcgaccagcagcccatggaagatggcaaggggcaccatttcctttccagacacacggataatggagggaagagctacatcgaccgaggttactccggccaccgaaataggagccagtttcccgaaatacttgcagatgaaaggagctcctaccagtgccaccagctcgcggatgacattcgtcagaagtgcaatcgtggccagttccgtagccagctgcgcaccaagatcgggggttttgagttccataatcagaatagacgaaagcgaataatatcccagtccgctgcccacggccagacagtcgaacacactccagcgagtcagtaacacactgaccaatgccgaaaacaacagggttcctccgatggtggccagcggtatcagcagcatcttgggacggaaaccacgaagcagttccttgaaatcctctccaccgccaatgctgacgcctacctgaaacatcagggcatacagaatatacatggacaagtggtgcgtatctcccaactcccatccggaaaagttccacacgtagcctaacacacagcctacaaagaacatggacaataccagcaaacttcctttcatttttcacctccttccttaaagaacaacagatataccacgcgtgccagcaacacacttcccgtaatgccggccacactgagcagcaacgcctgtccgccgaaagaccctaagtttcccacaatcaacggattgtaacccacggaaagtcctaacacgaacagcatcagacaaatggtacacgagatagtcagattcacttttttcaaaaaagcacacatacgaaggctatatcctgccagaatacctgccaggacgatcaataaaataatccacataacaaaattgagagtaaaagtttataagaaagatttcacaacacgtcaggaagacgcaacttcccgtgtcttacaaactttcatgaagaaatccgctgaaccaatgcgcacgggcatgacatctccggtaaagcgccgtactgacctttatccgaactaccttatgttgcctgcacatgttcatacgctgtatattatattctaaatctttgtaagttctaaccctagtctatttttgtgaaaacgtaaaatatgtttttacgttttcctgcccggaaacctatgtttcactttgcaaagccgtacgttttccggtcgggaaccctacgtttctcacgtgagaaacctacaaaagttcctgaaaaagctacatcttcttcaggacgtttttactttatctgcttcccaattgcgctgcaaagatagctcaaatcaaattaatatgcaattaatatgcagaatttatcacaaagggccatcggaaatacttcccgacagcccttcacatcaagaaaaagttgttttaacgacgccccgtgacttgcagatattctctttttttcaattcataatccgtatagctttccacatacttgtcacgactctgctgatacaaagtctgtgcatcaagcaaatcgctcatcgtgcaggtgcctgccttgtaataatcggtattcaggcggagattctcggtggactgctcaatggacagacgggcaatcttcatctgctcgtatgcctcgttcaccccgttccaggcattcttcatacggataaccagcaattctctctggtcggccaactggttttccgtgttcttcacctgaagcttttctttcttaatggcatgacttcctccccaccatccggtcaggggaacggtcaccgtagcaaatcccacccagaaacgctggtcttccggcaagaagttatggtatacatagcctccgccaatggccaccgtaggcaggttctttcctaccaccatcttgtattgcaggcgactggcctttacgttttgttgcagcagggcatattcgctggtaagtcccaatgccgattccggatcgcaataaaggctgtcaggacgtgcaggcagctgagtatccaccgcaaaggccacgtcaagggtatcggatgaaagtccggtgtactgtgccagcatattctgggataccgacaaggcattttccacctgcaaacgagtactctttgtttcattctgccgcaactgtacctgaagcaaatcgttccgcgtcacgattccagcctgtaccgaagcttccacatcactcaggatgcgtgccagttgggcttcgaccttggacagggttttcagcttttctttcagtatcactacccgccagaaatattgttccgtggtgaggcatacttcattgtcggacaagttccgttgcaggcgtttcacttccactcctaccttggccagctggtttccgttcacaatctgtccgccggtgaacaacggcagggaggcaccgactccccctgctattccgtacttcagcatggacatgttcatgtccggtcccaaactcatctgcatcaatcctttatcagccatgaaaccggttccagccgcgctcacgctcggaaaataattggtaaatgcctttttcttatcctgcttggccatttccagttcattgtttgcattcttcattcgcacattgtttgtcaaggcagcctgaatgcattcatccagcgtataggctttctgtccgaaagccccattcatgcacgccccacctatcaatagaaaagctattattctgtttcgattcgttttcataatgattcttcttttgattgattcctaatcacctcatcaggctttctccaatgcttccagctgggcacgtttctgactgcttcccctgaaaatcactaggtaagctaccggaagcaccgtcaagaggaagagcatggtaatcagcgtaccgtaacaaatcaccgtacccatcggcatccagagtccgctcttgcccaatatcatcggaatgactcccatggaggcagcggccgaagtcaggaagatgggtcgcatacgtcggcgggcagaatggtaaatggcatcacgcacgcatagtttctccgtagcccgaagttcctcagcatagtcaatcatgataataccgttacgcacgataattcccatcaggctgataatacccagtgtgcaagtcataccgaaatccactccttgtatcagtacgcccactgccgtaccgaacacacacagcgtcatgctggcaaatatcagtagagcaatgctaatacgcttgaaatgagccagcagaatgaagaagatgatgaaagccgcaatggccagagctgccatgataggcggaaggttttcattgtcctgctcgtcgtcacctccgtaagccaacgtcactttatccggcagagggatagctgccactttttcctttatcacactcgtcagggcagtcacgttcacgtcacggcgcacatcggccatgaccgtaatggtatagataccgttccggcgtaccagctgtccgtcttttacggaaggtaccacttctgccacctgccgcaagggaacctgcgtaccgcccaataccggaatcagttcgttttccagatcggagaaaccggcacaatcggctctctcacttttcaatgtcacggggatgtcataatctccttcccacacactagccacctttataccgtcaccatagcgcatggccagcgtgctttccaattgcacattctgtatgcccagacgagaagcctcatcttctttcagcaccaccttggccgaagtctgcggttcactgaagttggtctgtgccagccgtatttccggcatctgacgcaacatgctcaggtatttcccggccacggttttcagtgaatccagattctctccactcagacggagttctatcggatagactgcctgactgaaactgatttgcttgaaccttacccgcacatccggaaaagcatcggtgtaacgcggagcatattcatccagcagttccacggtttccttgtttcccttcgtgttcacaatcagctgggcgtagttcgttcctcctaattgcggagcgtatgccgtatggaaacgaggggaagaacaaccgataaatgaagtgacggaagtcacccgcgggtctttacggaacacatgctccatggtatcggcagcccaggccgttttttctacagccgagcccgtaggctgatagatttctacggcaaactggttacggtcggccaccggcatcagcttttgcggcagttttcccatcaggaagatacccaccagcacggaaacgattcctcccagcagagtaacatacggatgggcaaaacatttgtcaagcaacttattataataggtttgcaggagttccatgaacgagaatccttttttatgcgaaggtatcggcttacggatgaaccagaactgcatgaacggtaccagcagcatggctaccagcaaagagatgcccagaatcagcgtaatggaccaggggaaactcagcaggaagtcgtgtatcatgcctggaatcacaatcaggaaggggaagaatgtgatactgatggccagtgtagctgagaatatggacttgaagaaatgtgtggcactgaagatagacgcatgccagcgcgacattccctctccgattttctccagataactgtcgatgatgacaatggagttgtccacaatcattcccagcgtcacaatcaaggcagccagcgtcacggtattcaactcaatgccaaaggcatagaaaagtcccagtgagataaaaatggtaaccggaatggtggaagcagctaccagtgccactcgcaacggtaaaagcagcatcaccacaatcactacggccacgatagcaatcaccagctcacgcaagaaagcattgacactgtcgcccaccacctgtgcctggtcggtaatgcggaacatattgacctccgacggaagctctgtcttaaactcttccagcacgcggtcgatatcattttccatctgtacgatgttctttcctttcttcatttccacactcagcaggatacacttcgtcccgtcgttcttgatgtagctgtcggcatgtggatattccttgaccacacgagccacatcctgcaagcgtaccacattgcccgacggatcgctgtacacaatctgctgctgcacgtcgtacagcgtgttgaatgtcttctccacgtgcaccggcaatacatactgaggggtctgtatgcgtccgcccgtggtcacgaatcctttggcaaacagctgtccggcaatcaactgcccgttcagtccataatgcgagagacgttccgggtccaggtagatggaaatctgttcggccctttctccgctcacggtgagtcgtcccacactgctgatgcgacgcaaacggttcttcagctcatccatatagtcggacagttcccgatacgtcttatccttgctctccatggtaatcagcaacgccgatgtatcgccaaaatcatccatcacctgtatggcaagcacattcggcggaagctgcgacttgaaggtggctactccatgcttgaacttgctccagaactcatctttgttgttcagttcgtcattcaactccacttgcacaaagacaatcccgtcgcgcgtagtagagaacgtcttctccttctttacttccttatatgaaaagatgtagtcttccagaggcttcgtcacctgttccaccatttcattgaccgtatttcccggagccacggcaatcaccattccctgacgtatggtaaaatcaggaaattcatttttctgcatctgcggcagactgtatattccgaatgccaccaggcagcacgtcaccagaattacaatctgacgatagtgcgtggcccattccactatgttccttttcttttccattgtcttacttcatttttacagtgccagaggagttccttcgcacactttctgctgtccttctactatcacttcatccccttcattcaaaccgttcaccaccgtgacacccgtcgccgtgaacttgccgcacatcaccacacgcttcgatgcttttccatcctcacctttcagccacacgaagtagttgttgtgttcgtccagctgaagcacattggccggaagtacgcacgcctgacttttatcggcatcctgcaaccagacttctgtcaccatgccgggcagcagtcccgtattttttgtctgaataccgacatttacctcatacgaccgtgacagcggattggcctgtacacctttttccgtcactacgccttctgccttcgttccattcagaaccggtgcctctatcacggctttctgtcctcttgccacgcgcgcgatttccgtctccggcacggaaatccgtaccttcagccggtcgtcggataccagtttcagcacctgaacaccaggcacgacgttctgtccgacctccagactcttctcggcaatgaccccggaaaacggagcgtacagctgacagtcggtcagattcttccgggccactgcctccatagactgcgcctgctgcaacttgctttgtacttccacccacttcatttcggccagactccctttttcatgcaattctttcatacgttggtaggcatcttccgcctgcttcaaagcagtctttgccgcctgatacgtattctgcatcgaaacctcatccagtgtagccagcaattgtccctgccgcacccggcttcctaaatcgacctttaccgactttacccgtcccatcagcgggaaacttaatgaactgccgttttcctcctgcaccgtacctgaaaaacgaacggcttcattacgtacggatgatactacgctcatcactttgacctttaccggttctgcctgctgcggtgcctgctctttatttccacaccctgacatcacagtcagaaacaaacaaacggccatcagataattctttttcataaattctaaaatgtttagtatgtctgcaatttgtgagcgcaaagaaaaaggcattacacgaaatatacggcatacataccaccttggaagtgttctatttttctatccgtccccactatcttccctatggaatactcatcaggaaaaataggacactgagaattgaaaaacattctgttcatttgcaaccgaatagattaatcaatgttatggagaaagaaatagaactcatcagaatgtccagcaccgaaatcatggaaaaggtagctgcctataaagacgaacagattatcatcttgaaccaggtaaataaagtaagtgaaaccgaacaatactcccccatacgggctgactttttcctggcgatcttatgcctgcgaggaaaagcgtctttatctctcaacaacaattcttatgaaatcggtcggaatgatttgatgatttgtcacccgcagacgctgctcaaacacggcatgataggagatgattttgagtgctgcggattctgtctttcaccagaatatgccaaacgtatttttgtgatgtccacatccgcaaacaactggtactcacgcctgtacctggaacagcatcctatcatttccctgaatgatgaagaaagccagcttttctgccagtactataatctgctgaattccaaactgaccggtactcctcaccgccaccagaaggaactgatcaatgccctcctgcaggccttcatctatgaatttcaggactccatggagaaatacatccagttaaaaccggtcgcattcaattcgtccaacaatctgttcaatgccttcatggaactgctgatatcttcctaccccaaggaacggtcggtaagctactatgccaaccggttgtttgtcacctccaaatacctgtcggctgtatgtaaggaaaattccggtgaaacagcttccgacctcatcacctgttatgtcatgaaggatatagtgtgcctgctgaaatctcccgataagagcatcaaggaaattgccaatgaactcaattttgctactttgtcatttttcggtaaatatgtaaaaaggaatttaggactttccccgaaagaatacagagagaaattatctcaacaagaaggaaatgtgtaataactttcttcatatatataaaaaagatgtccgcccatctcacaaagatgacaggcggacatttttatttttccactatccggaaattactgatgctgttcacgcagcaaatcgttcacggtctttaccggattgaaagtactcaaaggaacttctacgaacacggtattccagtcgctcattgaaccgttccacaagcccggcaattcgagtgccttcaagtcttttccattctttgacttgtaagaaataaagccggtagccttatccacatgtttcagcaagttgaacttattgcccttgtagtcgcgaacggcacataccaaatccaccggattgaagtgtgtacccttttcgaacatggctttcttttccgggtcgttcatatcaatctgagaactttccagaatctgcaaggaaatggttccatccggattataggccaggaacggaccaccgcccggttcgcccacattcttcaccataccgcaaacacgcatcggacgattcagtttcttacgcagatagatgaccaaatcagcatcttccagctctttcaagtccgttctgcggcaacgcaactgctgctgtacgaagcggataatggtttccagctgttcgtgactataatgtccgccatccagcagttccaggtattcaaatgcctgcttctgcagcgtaaccaatacaccggccagcaacttcttgtaagtcacggtatcagctttcaagcggtcgggcaccacattatcaatgttcttgataaatacgatatcagcatccaagtcgttcaggttctcaatcaaggcaccgtgaccacccggacggaacaacaatttaccgtcctcgtcgcggaacggtttgttttccatatcggcagccactgtatccgtactcggtttctgttcagagaaactgatgtgataagtcgtaccatacttagcctcatattcggcagccttggcagccaccagtttctcgaacaatgcacgatgctcagtagagacagtgaagtgtacattcacttccccactctttccggcagcatacaatgccccttctaccagatgttcttccagcggtgtacgcacgccatctgcataacgatggaacttgagcaaacctttaggcagcgctccatagttcagtccggcagactccagcaagttagaaaccactgccttgtaattatgttcagacaacagggcattgatgttctttcctgtattatccaaacaagccgcattcaagtcattatagaatgcaaaatcatgaatgtgatcgaagaatttcttctcaaaatcggtagtaggtttgtcatactcggcacccaagaattcgaacatattcttgaacatacggctggcagctcccgaagccggaacaaacttgacgattttcttatcacctgccttgtatgcatcccatgcggcaagatactgttcgcattctttctcatcggctttcataatacctccgttttctacggaagcagctgctgaaagcttcaagaatggaaaccccttttcaaaacaagccaactgttcggcaatcttttcttccaaaatgcccttcttggccaacaattctttgtcttcgtgtgttaacataatagttttttatttaggtaatgaatttctttctgtttttagaattacgtccaaaaatataaaaaatacgggaagagtgcaccatatcaacagaaaaaaagtaactttacccacaaacagcaaaacgaggaattatggagaacaacgacttttttacacaagaggaacacaaacaactgattcaactctacaaacgactgctgcggttgtcgaaagatacattacaaaaggatgactgccacaagctgaaaacccatctggtcaaggcaatggcagaaggtaccattccgcgaaatgtattccagatgaatcccattatcaaggatatgcagacggctgtcatcgtggccgaagaaatcggcatgcgccgcgcctcgattctgggaatcatgctccatgaatccgtgaaatacaatctttgcagtctggaatcggtcaaagaggaatatggagaagacgtggccggcatcatacggggactcgtcaaaatcaacgagctgtattccaaaagccccatcattgagtcggaaaacttccgcaatctgctcctgtcgtttgccgaagacatgcgggtcatcctgattatcattgccgaccgtgtgaacctgatgcggcaaatcaagaacagccccaacgaagaagctcgtctggaagtggccaacgaagctgcctatctgtatgcaccgctggcccacaagctaggactgtacaaactgaaatcagaactggaggacttgtcactgaaatatacgcagcacgacgtgtactatcatatcaaagagaaactgaatgccaccaagcaggcccgcgaccgctacatcgaggcttttatcgaaccgatacgcaaaaagctggaagatgccggactgaagttccacatgaagggacgtaccaagtccatccactccatctaccagaagatgaagaaacagggatgtcctttcgaaggcgtgtacgacctgtttgccatccgcatcattcttgattctccgcttgaaaaggagaaacaggaatgctggcaggcttattccatcgtgacggatatgtatctgcccaatcccaagcgtttgcgcgactggctgtccgtgccgaaaagcaacggatacgagtcactgcacatcaccgtgatgggaccggaagggaaatgggtggaagtgcagattcgtacggaacgcatggacgaaattgccgaaaaaggtctggcagcccactggagatataaaggtataaagggagaaagcggcttggatgaatggctgaactccatccgtgaaacgctggaaaactccgacagcgacatggaggccatggaccagttcaagctggatttatataaggacgaggtattcgtatttactccgaaaggtgacttgtacaaactgccgcaaggggctaccgtgctcgactttgccttttctatccactccaacttgggatgccggtgtacgggtgcccgcgtcaacgggaaaaatgtacagctccgccagaaactgaacagtggcgaccaggtggaaatcatgacttcgaatacgcagacaccgaagcgtgactggctgacctttgtcaccacgtcgaaggcacgcaacaagatacgtcaggccctgaaggagattgcagcccgtcagacacagtttgccaaggagacactggaacgtaaattcaagaaccggaagctggaatatgatgaggccatcctgatgcgtctgattcggaaactgggcttcaagaccgtaaccgacttctatcagagtattgccaacgaatcgatggacgtgaacgacatcatcgacaagtaccttgacatgcagaagcgggaaaccgagcagcgcgaagaaatcagctaccgcagtgcggaaggcttcaacatacagcagcccaccgacgcgaaggactacaaggatgacgtactggtcatcgaccggaacctgaaaggactcgactttacgctggccagatgctgtaaccctatttacggtgacgaagtgttcggattcgtcagcatcaacggtggtatcaagattcaccgttgtgactgcccgaatgccaaggagatgcgttcccgcttcccctaccgcatcgtgaaagcccgctgggccggaaagagtcagggcaaacagtatccgattaccctccgtattatcggccatgacgacatcggtatcgtgacgaacatcacgtctattattaataaggagaacaacatcctgttgcgctccatcagcatcgactcacacgacggattgttctcgggcatgctgacggtgaccgtagacgacaacgccaagctggaatcgctgataaagaagattaaaacggtgaagggcgtgaagcaggtaaaccgataacaacacttcaagtttgttaattaacctgcacaaaagtaacagtttcacgcaaaagtagtatctttgcgaagttgtcagaagtaaggattaaaatcaaagaaaatgaagaaaattttatttacaaccttattatgtgtcatgaatgtattgtttgtcattgctcagggaacggcagaaattacattcgaaaagacctcatacaactttggctctttctcagaaagcagtccgaaagtaacttgcaaattcaaatttaagaatacaggcgacggtccattagtaattcatcaggctattgcttcttgcggatgcaccgtacctcaatatccgaaagaacccatcaaaccgggagaaagcggtgaggtgacagtcacttacaacggtgccggcaaatttccgggacatttccgtaagaccatcaccctgcgtaccaactcaaagaacgaaatcacccgtctggtagtagaaggtgacatgactccggcatcagccgacatcaatcagtaacaattcatcatttttcatacttggcaggaggaacattttcaacgatgtttctcctgtttttttatgcccgaaaatacacacggaaaaacgtctttgagcctggaagaaaacgcaaggacgtttcaattgaaacgcaagtacgttttagttaaaacgcaagtgcgtttgactccaaacgtaagggcgttttgaagtgtactgaaaatagttgtcagtttgaagattaattcctgacaaagttgacaggttaaacattatattcctaaaaagg

SEQ ID NO: 3776 - DNA, 79434 bp, Unknown
  gut microbiota DNA sequence
cgtttttataccacagaggagcaccgtttttctgatcaactcctgcccattcgcgcagatagtaacggtcggtgctataacctactttcaacactttttctgctgctccggcgatgcttgtatcgttaccaccaccaccgataatcatcatgttcgggtcgtcaccatacagcttttcaagcttgttcttgttataacccatgttcaggtcaaggctccataaccagtcttttgtacggataatgtctccaccaatggtgatttcaataccagagttgcgcatttctcctacgttctgccaacgactggtgatacctgtcaatccggaaaccggaacctgatataagatgttggaagtgtatttattgtagtagtcgaatacgaaacgcagacggttgttgaagaagttagcatcaatacctactccagcggtataagtctgttcccaagtcaggtccttgttgccaacctggctgataagaatagcaggaataccattgtagttagaagaaacagagtacaagccgtattgcggatatttagagtatggaatattacctactgaaccataagatgcacgtaactttaatacgtctacccagtcggctttgaaccacttttcgcggttgatgttccatcctgcactgattgagaagaagttaccgtatttcttatcatctccaaagtttgaagccccgtctcggcgaagagatacttctgcaagataacggttgtcgtaagtatagtttgccttggcaaaaactgactgtttagcccattcagtaaggtttcctccaacttcttcaggggtagcggttgcatccagtacctcaaagccagaaacgataccagtacctttggcgttgattactttggcagatgtatccataaattcatatgccagcaatgcctgtacggagtgttttccgaatatcttgttgaatgtcaggtattggttggtatatcgttgtatgttgttggtctgttcttcttctacacgtccttgtactccagaagcactgtctgtacgcggatctgtataagtagactggaagtagcctgtccaacggtagttattgacagacgtgaaagtcagccagtcagtaatttttatatcaaagtcaaagttcccggagaactcgtacgtttttcttgcggtatgatttccgtaagaaatggagttcagatagttcaggtcagagctgtccacccatccgctataacggtcgggtaccaggttgccgtcttcatcatatgggctatcccaagggaacattgtatatttagcagtataatcatattgggaatcatccgtatttttcatcgaaccggatatgttcggtttgatagtcaaccatgaaaatggtttgtagttggaacgataacggaagctgtatctgtcgtatttgtatccttttacagttccttcttcgctataatatcctaaagagaaataagagctcattttctcgtttcctccagataatgaaatattatagtcttgcgtaaatccagcttgtgatgccagttctccccagtcgaaattcgcatttcttagttcggggttccagcgtgagaatttgatgtcttcctgatttgggaaagatgcatagtagtcgtatagctctgctccgttcattacttccatttttccgtttgtcatggtgctgacaccgagtttgaccgaagcattgattttcattttttcgctttttcccattttggtagttacaatgataacaccattggcaccttgtgaaccgtaaatggcagttgaagcagcatctttcaatatggtcatgttttcaatatccgatgggtttaatacaccgggatcttcacctacgattactccatctataacccataacggagaggtgcttccgctcagagtcgcacgtccacggatttgtaccgcaccattagagcctggttgtcctgaacctggtgctacgtatactccggatactttaccgttcagcatattttcaacggtcggggtagtaacatctttcagtctgttttccttcaatgtagacatggcaccggtcaaactctcctttttctgtacaccatatcctactacaactacttcatccaacgtttcggtatcttcgtgtaacttgatggtttgttcgctggtggtagctgctatttctactgttttgtagccgataaaagaaatttggagtatggcaccggcaggagcatttagctcgtattttccgtcaatgtcagtgatagttccgttagtgcttccttttacaagtacatttactccgataacaggctcgccggttgtagcatcaattacttgtccttttaatttttgatcttgttgctgaactgccagatttgtgccggctgtagaagaagttgcaagcgcaggcaaagaagtgcagaatagggcacttgccaatacaatacaactgctttttgcaaaacatgtttttgaactcatagtagattagtattgataatggttttatattatattttagttcggtggcaaatgtaatatatttttataaaacgcaaacatttttggaataaatttattttgtagttccctgttttttaaaaagtaaacataaccattttggttaaaaatattttattgttttagacttgttcagttagaataaataaaaaggctatctcattatgagacagccttttcccatttctttagttagaatatttagattagaatcccagtccagccatatggttaagcagttcatacactccactgcagatacccaatacaatgactccgataaggcagataaacagacctgtacgggccagagccggtgtgcggaaggtggctaccggtgcatcgtttggagtgatgtacatggctttcacaatcagcaggtaatagtagagtgaaataatcgtatttaccaatgccaggaacactaccagccagtgaccgctatggaaagcagaggcaaatacaaagaatttagagaagaatccggcaaacggagggataccggccagtgagaacagtgccagtgtcataacgaagctcaggcgtgggttggtcttgtacaatccgttataggtgcttctgtccacctttcctccggtgtgctgctctatggtgctgatgacaccgaacacagccaggttggctacgatatagactacgatgtagtacaccagtgaagccattccctgttcatttcctcccagtacagccagcatgatataaccggcctgtgagatactactgtaagccatgaagcgtttcaggtcttcctgaaggatggcaaagatgttggcaatggtgatggtgaccacaatgacgatgctcagcaagagactccagtcggctaccatctgtccgaatacttttaccaggatgctcatcagcgcaaaggcggctgcacctttggagatgactgacaggtaagccgatacattggtcggagctccctgataggtatcgggtgtccacatgtggaagggcacgagactcagcttgaagcccagtccggcaaagaagaacaccatcgccattacctggagcgaggttccggtcagggctgtggtgatgccggcaaagtaggtggtaccggttgtaccgtataccatggagatgccataaagcatcagggcagaagagaacatggagttcaggatgaacttggctcctgcttccgcgctgtgatggcggtatttgtcgaaagccaccagacaggccatcgggatgctggccagttccaggcctacgtagaacaggatgaaactgcctgcgctgaccatgaaatacatgcccagcagcgtgctgagtgtcagcatatagaattctccggctttgtgacgggtatcttcgcgtgagagccattcccctgactgcaggaatacgagcagcgtgccggcagtcagtatggtttttacaacagatgccatttggctggcatgatacattcctccaaaggcttctccgctggcgggtacaatgtttaagaccagttgtacgaccatcagtgtgcaggccagcgtctgaagcggcttgtgattaggcgttttcagtatcaagtctgccaacagcatgaagaggataatggcgaccaggcttatttcagcctgcatggttaataattcgctcatataatttcttttagtttattcaggttatcggataagttggctgataataggttctacgcttccgctgatgacatggctgacccagtaaggagcgagtcccagtccggctacagctataatcaggcagattacggcaaaacgttcgtcccaggtagcgtcggtcagtttcaggtgttccgggttctggcaggtgccatacaggatttttcctactacacgcaggatgtacacagccgtgatgacaatactcatcgtagcgatgatggtacaagtgcggtggaacaggtccggattctggaatgaacctacgaatacggtcatttcagccacgaaaccgctcagaccaggcagacctaagttggccagaccggcaatgacataacctacggccaggaaaggcatgattttcatcagtccgcccagacagcggatgtcacgggtgtgtgtacggccgtaaatcataccgataagggcaaagaacaaggcggtcatcaagccgtggctcagcatctgcaggatggcaccggtagcacttacacgcgtcatcatcagcagagcgaataataccagtccgcagtggcttacagaagagtaggcgttgatgtatttcaagtcggtctgcactacggcactgaacgctccgtacaccacggaaatggtggtcagtaccaggaagaaatcgccccagatagcggcaccggtcggcatcaggtacatggcgatgcggaaacatccgtaacctcctaatttcatcaatacaccggcgtgcagcatacttacggccgtgggggcagaagcatgaccgtcggggctccatgtgtggaaggggaacaaggcacccagcacaccgaatcctaggaagaccatcgggaagaagatacgttgcatttcggtcggtatcttgtgctgcacgatttccaggatattcatcgtctcggctccggctccgtagtagatgcccaggataccaatcagcaggaaggcagaaccacccatcagcatcaaggtcagcttcatggcagcgtattccttgcggccgcttccccacacaccaatcagcaggtacatcggaatcaaagccacttcatagaacatgaacatggtgaacaggtcggttgagatgaagaatccgaatactccggtgctcagcagggtgaaccacaggaaatattctttggtgagcggtttcagcttccaggaagcgaatgtaccggtaaatacgatgatggcactcagcagcagcatcactacggagataccgtctactcctacagagtaacagatgtgaagcggggcataccatacgatgctgtctgtgaaaagcatttcagctgtagctcccgcatggcgctgtccgatgtaagacaccgtgaggtaagccgcaagtgccagcaataaagtggaaccggccaccatcactcctctgacttgattgacgttgcgggcaatccatagtcccaacaacatcagcaggggtatcaatacgaaaagacttaatatattcataagcgtataagttcttcttttttagttcaacagcaagataattgtcaggacaatgattcctgccaggaaataatgcgtgtaggtttgtacctttccactttgtatgggctgtacggtttctccagctgcgttggtaccccaggccatgaaattcatgaactggtcgatgacgtggcggtcaaaccatgccaatggagtagagatgcagcggaagatgattttcttggtcacgaacaaccagatttcgtccatgtagaaacgcttgtaggccgcacggtgcagagtgctgaagcgtgtagcgagcatgtcggctacaggctgctgttcgcgggcgtacatccaggtagccaaggcaatggcgatgacggcaatagcgatactcgtaccggctactgtccagtcgaggtggatgtcgtaggattcaccgttggctgaaacgaaatgtccgaaaggaataaaaccggctacgatggtgaccagcgccaggaacatcagcgggaaagtcatggtcagcggactttcatgcggcatgtggtgtgcatgcagttccttgttttcctttccccagaagatgcagtagtacaagcggaacatatagaaagcagtcattccggcaatgatggccataatccatcccatcacggggctgtactggaagcaggcggtcaggatttcatcttttgagaagaatccggagaacggagggatacctgcgatggccagacaggcaatcaggaaggtgatgtgggtaatcggcatgtatttgcgcagaccgcccatggtttccatttcgttgctgtgtacggcgtggatgatgcatccggctcccaagaagagcagggctttgaacatggcgtgtgtgaacaggtggaacatactggccatgtaacctaaaccgccttcgtgcgggttggcagccgtgcatacacccagtgccaccatcatgaaaccaatctgtgagatggtagagaaggccagcacacgtttgatgtcactctgtgcacaagctacgcttgcggcatagaatgcggtgaaagcacctacccaggctaccaagtggagtgtgtgcggcgcgaagccgatgaacaaggggaacatacgggctaccagatacactccggctactaccatggtagcggcatgaatcagggcagataccggtgtcggaccttccatggcatccggcaaccagatgtgcagcgggaacatggcactctttccggcaccaccgatgaacatcagtcccaatgcccagggcagcaccattccggcctgcatcaggcgttcggttccagggttgaaggtgaaagtctgcatgtagtatccgtagataaggataccaatcaggaagcccaagtcagcaaaacgggtgacgataaaggccttcttgctggcagcgattgcttccggtttggtgtagtagaaaccaataagcagataggaagacacacctaccagttcccagaacacatacatctggaaaatgttggtagctaccaccagacctaacatagagaaggtaaacagcgacagaaaagcgtagtaccgctggaagccgacttcacctttcatgtagccgaaagaatagatatgtaccattagtgacactgtggaaataaccaccagcatcatgacggaaatcggatcgagcaaaatacccatgtcgatgtgaagggaggaagtgaacggcagccattcaatgttccacggagtcagcgtagggtagaggccttcggcagtacgtggagcagagaaataattgaatgccgtcagatagctcagcacggctaccgctcctaacgatagggtaccgattgtgcctgctactcgatgaggcattttcatgccggccaatgccagaaccaggaagctcagcaccgggagggcaagtatcagaattgtataatccataagcaattgaataaaatgtgagaaagttatcctttcaagtcagtaatatcatcggtaagcacctgtttcaggttgcgatacacattaataatgatggcaatggctacagccgtttcagctgcggcaatggctatgccgaacaggctgaagaaatggccttccagttgtccggggaaaagataacggttgaataccgcgaaattgatgttggttgcattaagcatcaattctaccgaaatcagtaaagccagcaagtttttgcgggtaaagaatccgtagatgccgcaaaacaacataacggtactgatgacgaggtagtgaactacatgaatttctatttccataatcttactgtgttatttttgtttacgtgcaatcagtatcgcaccaatcatacaagctaagagcaatacactgactacctcaaatggtaatacaaactggtatttccctgtaccaatcaaggcatgtccgatgttttctaccggaagttcgactccctgtggaatcaggttcagggcaaatccgttggtcataactaagaaaagcacgagagctgcaccgataacaatggtcagcaatacactgatgagcttggcgcggtttattttgtacttcatattcttgtccgactgggtcagcaggatggagaatacatacagcaccacgatacctccggcgtaaaccatcagctgtacagcgctcaggaaggtatagcccaggattccgtagatggctcccgtacctaaaagaacgaacagcagataagtagcggcacgcaggatttttcctgtagtgacagctaaaatggaacaagcaatgatacaggctcctacgatataaaatacgatttcttgaagtgatatattcatatccgtttcgttttatttatttcttgttcagtgtcatgacgagtttttctttctggaataccgcattctcaaagtcattcgtaaactgaatggcattgtgaggacaggcattgacgcacagcatgcagaacatgcaagagcctaagttgtactcgtatttcaccaggaattttttctttttaccgtcttccgtctcacgcatttccgtggtcagccggatggtgccgttcgggcagctcatctgacaaagtccgcaggcaatgcaatggtgatttccttcttcatccaccggcatcaccagcatggcccggtgacgttccggaatgtgaagtgtagtatggcggttttcaggatactgttcggtaattttcttctggcagaacactttcatggaagtgcgcatacctaccagcagactcttgactccaccgacatatccttttaaatattctttaaatccattcatagtcaaaattttttaatcaaaatgtcagaccaaatactttgcatacggtcattaataacaatacgaccagcgagagcggcatcaggtatttccattccagtgtcagtacctgatcgatacgcaaacgggggaaggtccagcgaatccacatgagcaggaagacgatgaagaaggtctttccaatgaaccatacaaatccggggatgtagtccatcaccatgttcagtccgtcgagtccggcaatgtgcaagggcatccagcctcccaagaacagtgtagtggcgataccggcagtaatgaacaggttcaagtattcggccagatagaagaagccgaaatgcatacccgaatattccgtgtggtatccggcggtcaactcctgttctgcttctgccaagtcgaacggaccgcggttagcttccgcgtttccggcaatcaggtagatgacgaaagccatgatggcaggaatgtgtcctttgaaaatgttccatccgttggcctgaccttctacgatggtctgaatatccatggcaccactcattacgaccatggtcagtacgctgaggccgatagaaagctcgtaactgataatcatggctccacttcgtacggcaccaatcaatgtatatttgctgttactactccatccggccagcaagatacccaatacaccgatggaagaagctgccagcacaaagaagataccgatgttcatgtgaaggatttctccacctttattccatggaagacaagagaatgtcagaatggaagcaagaattaccaggaacggagccaaagcataaagaaaatggtcggaatgcttcaggctgatgatttccttggtaaggattttcaatacgtcggcaggtacttgcaacaaacctccttttcctcctacacggttcgggccgatacggcactggaaagccgcacagactttacgttccatgtagataagaatgatggccagtaccgcgtacatgacgaggataaatactcccacagcgagtccttccaatgtaagtgccagccattcaggcattacactgcaaaggaatgcatgaatctgcatgagcagcgggctgagattataataatctaaaaacataattcttttattttttcagttttctgtaatgattgttcctgaagtttgtgtggagattaacggtcaatgtcagggatgacaaagtcgagtgtacctccaatggcaattaagtcggcaattttagctccacggcaaacggtatccatggcgtgaaccaacggaagtccggtggaacggtagtgcagacggtaaggaactttatcaccatggctctccaatatcacatcaaactcaccacgactggtttctaccgatgaagtgaatacaccctccggcaacttgatgatgggtttggtcttggcacggaattctccttccggaatattgtcaatcagttgctcgatgatatggcaagactccatgatttcgtccatacgtaccatgtaacgggcaaaggaatcaccttccgtgtacacaatctccttgaagtccaccttgtcgtagagtgcgtacggatgatgcttgcgcacgtcgttggcccatccggaagcacgtccggtacctcctgtacatcccagtgagatggcgtcttcctttgacaaaactcctacacctttcagacgggtatcggcaatgacgtttgaagtaaagatgtcatgatagtcctgaattacactgcgcaggtgtttgataaagtctttcaccttctgctggaaggtaggatggatgtcagcctgtacacctccaatcatgttgtagttctgaatcagacggcctccggtagtttcttcaaaaatatccagaatcatctcacgttcacggaaaccatagaagaaaggagtcagtccacccatatccatgaccagacaggagtagaacagcaagtgtgagtcgatacgctgcaactcgtccatgatggtacggatgtactgggcacgttccggtacttctattccggcagctttttcaatacacatacacaacgcatggcgattctggtgagcactcaggtagtccagacggtcggtcaaggctaatgtctgcgggtaggtgaggctttcgttcattttttcgatgcctcggtggatatatcccagtatcgggtcaatcttacgaatgttttctccttcaagagaggtacgcatacgcaatacaccgtgtgtagaagggtgctgcggcccgatatttactacaaaatcatcttctccaaacaccacgttcttacgtccctcaagtgtgccgtcggggcggagaaagtattcatctgtcatatcggcattttcctcgttgtccatccgaagtgggttggagttcatgtcataatcctttcgcataggatagccaatccagtcctcacgcaagaagatacggcgcatatccggatgattcaagaagcagataccgaagaagtcgtacacttcacgttctttaatcagagcggttttccacaagtcgcttactgtgggaagtaatgccttttcacggtctgttgttaccgctttgagtgtgattcttgcacctgtgcgggtagattccagtaagtaaagcgcacctaagccttcttcaccccagtccattcctacgatgtcacgcaagaaatccatcgggttttctttgtcattcagtagtgtctcagctatctggtgtaacttttctgccggaacttttacgacagtctctcctgtctggctgatttcggcttcaggaataatgcttgttattttttcaatttccatttgcattttttctttttacgtagggtttattcctctttttctttacggtttacttctcctaagaagcgctccaccttgattttacgttggagttgcatcatgccatagaagaatgcttccggtcggggaggacatcccggaatgtacacgtctaccggaataatcttgtcgataccgtttactacgtggtaagatttgatgaaaggacctccggagatggtacatccacctactgctactacgtatttaggttcggccatctggtcatacagacgttttaataccggagccattttgtgtgtgatggttcccagcaccatgatcatatcggcctgacgaggagagtttcgggttacctcaaacccgaagcgggccatgtcataacgggctgcgcctaatgccataaattcgatggcacaacagctggttccgaacgtcagactccagagcgaattgcttcgtccccagttaatcagttcgtccactgttcccagtacgattccggcaccgtccatgttcagacgacgtaccatgtcttccagataatcattgttcttgaagtcctcatactccatagaacgaatagaggtagctttttttacttccattcaagagctcctttccgccaggcgtatgccaggcccaaaattaaaactaccaggaagaaacctacactgaccagtgcatatactcctacctggccggccactacagcccaaggaaagagaaataccgtttcaatgtcgaacatcaggaacaagatagcaaacaggtagtaacctgccttgaattgcacccatgattgtccacgcgtaggaataccacattcgtacggttctcccttctgcggattgaatgaccgtggagcaagtaattttgcgatggtcattgctgccacaacaaggacgatagcagtcagaataacgacaataataaatgtaaaaaacatatatctaagaatttttgatgatacatatagatgataaactacttccgttacactgcaagcctctgtctgcaatgtatcagaacaatctattttaaactgttcttagatagtattaaataaggatttttttgagggtatatagataatagaatttatctaattgtgtataaggatgtgtggaatatacagaacagaccagccctaaatgtgtgggtggtctggaaataaagtcttgtccaaacgagaataccggcaggaaaaacttaccgtccaggtttttctgggtttgtatgaataaaattttctgcggaatatctgcttgtatgttggcaatcagaaagtcaagcgttttcgaaggaatattgtccggatgctggtagatggaatcagccgattgggtttcctctgctgtattgttctcattgagcacggtggaataaagcgcaaagaagtttgctcctatgagtacactcataagagtaattagggatatacaagcaaaaatcttccacttattcatgctaataccttcaaaaacgctgcaaatgtagccatttattttgattcatgaatctgtattttcattaatttttcttgtcaggcagtttgctctgtttttagaaaggataaccaatggcaaaatgaatacccattccgtccttgaatttaggtatattatagtatccactcttttcggtatcgtatggcacatgaagggcaaaaccgaagtccagtctcagaatcaggaaggaaaggtcataacgaattcctactccagttcccaatgcaatgctgtcaaagaaatgccggagattgaattctgcaccggggcgagcttcatctttgcgcataagccatacatttcctgcatctaaaaaagctgctccgtttaagtttcctcccataaaatttgaaaagatacggaaacggtattccaggttggcttccagtttgatgtctcctgtttcatccacgtaggaataacctgaattattagccgggtggaatcttcccggaccgatggagcgtacggtaaaggcacgaatactgttggcacctcccacatagaactgttcgctataaggtgcgattgtcttgttgccgtatgcccatatcactcctcccatcagtcgggtagctaactgttgcttttcactgatgtggtaggtatatcttacttctgaagaatatttcaggaactgcgcaaacggatttcccaatagttccttctcctttttgctgaatttctgtccaaaagccgcataaatgacggatgtcacatttccggcagaggtgagtgagttttcccaccacacacggttctttttcttccggtagctgttgtcgtaagtaaccgtgtaggtcagtgacggaatgaactggtcgtccaaactatggaacagcatcgggttggcattggcaatggagtcaaagcgtgcggtacggtgctgcaaagtgttgaatgccaggtgaattggagttacggtatgcttaatactgcgtttcggttgaaaactataggatacagtacctccaaatgacaacatcttgaagtagcgggcacgattcacctgttctgcgtaaatcttaaagttggtttcagacgggaaacggaaggggtctacccgatttctaatccatggtaaaaccagtcgtggaaaattcagagagagggcagctcccagctcgtaagaattcatcacagaactttccccgtctacagtagaactggtctgccattcgtatgaacctttcaactctaagttcaaggaagcacccattcttttgaaattcttctttgaaagattgaatttggctcccggccctgtttgcttggtactcttggtggtgacattaagttccagttcgctgtcataaggcaggtcgaacatggcattgaccgtaatgtccagggtatctcttcccggacgaggagtgtaattgaaatcattgtatttgaacacgcctaatctggacaatgcctgctgggtatagttctggcgttgctgagaatacatttctccgcttttataaagaaaacgtcggcggagtaccccatatcgtatgcccggcttttttcctgcataattaatggtgaagttatgaaaattcaatgaatcattgggttgttctccattatgtcctactagattgatgcttgtctttccaatatagtaagtacgcaatccctcttccggaatattatgtttctgtacaactcttaagttgacataaccgggacgaatcaatgtgtcggccatgaacgtaataaaatctgggcgatagaaataatatccgttgttacggaatagttctaccaggcgattcctttcttcgtccaatttattgacagtgaacgcatcttcttttattaacaggcgtttactatatgtagcatgaatcagactgtcttccttgggtgaaaatcctacataggtaacggagtctaatttgtaacgttgtccggtgtatatggtataatttaatttggctttcttcgggttcttggctgtatctacttgcactgtcacgttgccttggaaaaagccattttcacgtaaaacgttacttgctacctttgtacgggtatcagggttaacggtagatacataaatcgggtcggcagccagtttcttgaaaatccatttaccaatacctttttcgtatcgttcaaaccggttatacacccatagtcctaatgggaaagggatacggaggttggggctgccgaaaaatgaattgttcggtgccacgttcaatgcgccttgtacttcttccaaagtagcttctccattatcggcttcattgtatcccacaattttaggagtcggtgtaccgatatagagcaactcgtcttccggaagatgcttggttgtggaacatccggttatgataaataacagaagtcctgtcagtaacagtttatttattcttctcttcctcattttcatcttcttcttttttttcgacttcaggctgtggttttttcttctttctgaaaataaacagttcgcccactttactaactttcttgcgcagtacaataccggctccggtttctattacttctccatcgagcacactttcgtagttcttatcatggaaaagcttgacgtagcgagtaccactgttgtccagacgatattctaatgagatattatcaatgaatgactcgtcctgctgcacattattgccggtggatacttttccaccaattaccactcggatacggttgttccagaatctcttggcaaactggaagttataatccgtagatgtctgtccggtttcttctccattattggtttctataccgaaattcacatcaatggtcttgagggcacttccagccactttggaaatctggtcttgcaagaaagagttcatgacactgcttccaccacctcccagtgtactaccttccgtcaggtacatacctgttaccagcatggttacagccaccttgttcttttcttcagccgacatggaagccaattcattttgcatggtaccgtcatccggagcatcaatgataaaggtaaatcctaaattctccagtgtattggtgatgttgacacctacatcgaagttgaccatgcgcgatgcctgcccttcttgtgctactgaagaacgtattctttccgtcgcttttatactcatgagagggttcatcgcatttccattccactgtatgtaacttccgctttgaatatggaaggtctttaactggataattgggagctggtatttcatttcaccgcttagaagagaataccttccgttcagaatgatgtttccttccggagtatattggaaagacaagtcgccacctccttcaaagtacatgtagttgcttcctttttcatccatattgacacggcactgtaccccttcgtctatgtgtaaggtcatcagcatgtcgatacctcctagtgagagggctggaagaacccttctttgtgcagaagtcgtatcgctgaagttggtgaaggttactgtttcttccagacggtcttctacggtcagcggagaatcctgtaggatataggtaaagttactgttacccaaaatattcatgttaccgcgtatattcatgttatcgggtgtacctttaagagtagagtggaaatccacgtacaacttcccatatacgagcgactgtttggtctgcttggcattcagcaattcaaaattgttggcatccatcttcaggttcattttcatctgactgaaatctgccatgtccacatccccgtcaatggtgaacggagttttccctttggtgaagatcttgaaacggttgaatgtaagcttgctgtccttgatttccaccggtttgttatcaaatcggaggttcagagatgcttgcggtacgtatacatttacgctatccaggttaatttttccgttcatgagcggttgggaagcattgccggacatttgcatggtaccgtcaatatctccactcagcatagccatcttacccggaataaaagagtttgctatttccagcgggaagtgatgcaatgccatacgtgcatctatccgatcctctttttgttctttctcttcagccgggaagtatgagccttctatactgattacttccttgtcattctgcatgatgaggccgttgatatgctgttcaccggtttgtttgggaaggtagaccgcactcaaagcccagtcgcccaaagctatcccgttatatctgagctggttgatgttgttctcaagagaaatctgatccatgccgtcttctgtctgcacataatgtgcttcagagttaatcacgccctcgatgtctggcatatacggaatcactcgtttgaactctccaatgttaatctgagtcagggatagagtcaaatcttgctgtgccgtagaatctggagtagaatagaaactcagtccggtacgcaattcatcgtaaatggacaaattggccatgattcgtccgtcatctctcagatagatataattatccggattaaccgtaaacttacggtacactaagatagggtcaaatggggtgatgtggagactgattccgcctttttgcaggccagccaccatacctatatttactccacattcttttttaccgttcagatattcaatagtagcattagctttgtcagctcctatatctccattcagtgtaatatcgaaagcttcttggaacggtttgtcattggctatgactccactgttaaacaaaatcttatcaggctgttgggtggcattgaaatagatggtgtcaagcgctagactatctgtctttaatccataaagattcatcgacgcattcaatccttctgcaggggaggtgcgtatattcacattcatgcggttaaagtttatctttttgatggccagtgtattggaaatggggttgtcctttcctgcaaagattctgaactgggtttctggccacagctcacgaagggcaacctgatcaattgatttctgcttccattgtgcgctcagtgcattcgtcagtttggttatctgattacctaactcatcaatacctcctcggcttctgaatagaaacgtcaggtcacccgcatttgcgtagctcctgatagaatcgcgtgcagtgctgaagccgaaatgtatatctttcgtcttaaatgtctttttttcagtgattaaatttatgtcttttacagataaacggataccgtgactttttttcatgtccgttctcatgtgaatgtcgatattttcggtagtccttaacggagaactgagcaatcccattccgtataaatcaagattcttcacttgaaccaacatatccgcagcaattgcagaagggtgtagggatgcatctaactgcgatgagatattcatcaggttgtcattcacatccaagttgaggttcgcttttgattctttcagggctgcattaagctgtacgccagagaagacacgggttccccattgaaggtggttgagtgcggcattggctgttaatgtagttcgtttggaaaaaatatctgttcctgctccttcaagttgcataccagcagagagataaaacaacgaatcagctggcaggaaatcatgcaggtttagctcactgatttgcatatctgccttataagcttctttaaggaggttgtattccgcatttagctgtacttttccttcattctggcttaaggtagtttcggtaaacaaatcgttacctttcataccggcctttccatgaatattcattcctgacggaataactactccgtcggtcaggctactcagaaaatccattttatagaaatccgagttcaggttgatcactccctctctggaaagactgtcgagcacattttttaccgttccgtccatttccatacggaaacaatcgggaattttaacctggcaagtagtcagtttcaggtcactcagacttccatctaccccgatacgaacttgtaatggagctgcagggaagaattgaataaattcttgtggcatgtctggaatcagtttgaacaaatcagctttaccgatttcagccatgaactgaccgttcaatacgccgtcctgattctgttcggtgaccgaccagtctatcgtagccttgagagccagaaaagaatttgcagttttgatttgtaaagaaggtacacgtatggctttctcatctgcctgtaattgcccctcagtcgatttgatttccagtcccgaacgctctttcagctcgaactgatgcagtaatgcccggatgttattcccctgataatataaagaatccatctgtaaattgatgtcggtcactgcaatatgtgacggatccaatcccttctctataggaggtgtattccctgagttatagtataatccactctgtaaaagcttaaattctttagcggaataagccgctttatgcaagtcaaccagtccgtctcttaaagaagcattcccgactttaagccctaagttcatggagtcaagtggcatatccatctgaaagtccacatttgccaaatcaatcttttctaatttaaacttccagaatgtaggtgcactttgggtggtatcttgtgcggttgtatctgccaggcatagtttcagattggcatcttttagtgtgagctcgttgagcacagctgtttccggcgtcaaggctactccatgcgatttcaagaaaagttctcccaggtttccctgcaaggacattccttcaatcaggtcgaccgtattgactgaagcgtttttcagttccactccatcaatctctatctgcttctttaccagagggagtaattgaatttttacggttagtttttccacattcaggagcgtatcctgagggttggtaaccgtggtttcatggactactaaatttagcggaaaagaaagcgaaattcgttgtatatgaatgttcatccccgtagcttgcgaagcgtatgatgtcgccttatccacaataaaattctggatagcaggtatatagattaatatacacaagactataaaaaggataaatggacttgctaatacaattcctccccattttatatattttttcatatacagtttaatcattagttatgcgaatatataaaaaagaacccaaaagtgatacattttgtttatgacaatgagttgaaatcacattatttgtttacctttgcgtagttactaattttaatacaattctatgaaaccaactttatttgtactggctgccggtatggggagtcgttacggtggcttaaaacagcttgatggactgggtcctaacggtgaaacaatcatggattattcaatttttgatgctatccgtggtggtttcgggaaattggttttcgtaatccgtcgtgattttgaaaaagatttccgtgaaaagattgtaagcaaatatgaaaatcatattcctgtagaagttgtgttccaggatttgaacgacctgcctgctggctttacttgtccggaaggccgtgttaaaccttggggaacaaaccatgcagtgttgatgggtaagaatgtaattaaagaaccatttgccgtaatcaatgctgacgacttctatggacgtgacagttttgccgtattgggtaaatacttgtcagaattgccggaaggtgcaaagaacgactacagcatggtaggttttcgtgtaggaaacactttgtcagaaagtggaacggtagctcgtggtgtatgtgcaactgatgaaaatgctcatctgacaacagtcgttgaacgtactgaaattatgcgtgtagacggtgtagtttcttataaggatgaaaatggcgaatgggttggtattgaagataatactcctgtttcaatgaatatgtggggattcactcctgattatttccaatattcagaagaatatttcgctgaattcctgaaagaaaatatcagcaacttgaaatgtgaatatttcattccgttgatggtgaacaagctgattaatgaaggaactgctactgtaaaagtactggatactacttctaagtggtttggtgtgacatacgctgctgaccgtcagagtgtagttgacaagattcaggctttggtagatgctggtgaatatcctgctaaattgttctgattagaaacagattataatacttagtataatgaagaccgggattacagaaatgtgattccggttttttgcgtgttatatgatgcattagaattgtgagtaagttatggtatggttatgaataaaagtttgtcgacgggaaaataaaaaactacccaagaatgtgcagaatacgcaaacttgggtagttctatttcttcttaaaaagatggaagggaaggtttatttaccgccgtttatccatgtcttttcagagtagatataatatccatctccataaacactgctgatattaggattacttaatacgctactatttccgtatggtaaacgttctgggaatcggttgactcctccttgagtgttatacggatttgtcaagacaatataattttcacccattgcttttacacggcgtaaatcattataagtttccacttgctcatctacgctttgagcgatatatttctgttcgaataccttttgaagtgttggtgttcctaatgagctggcgtaagcgctggcatctgtatcatcatcaaaccaacccataatttcacttacagaagctgcaacagccttttggaattcggtagtggcgtcttcattaagacgtaatttaacttctgaaagaataaaatataattcagaaacgctgaacatgtgaataggctgtgagcctaagtcgtaccatgcgggataggcaagacttccatcggcaacctgcgcgatttcttcatctccaggttgatatgaccctccttctgacttatctgttttataaatgtaataaggtaaacgaggatcatctgttcccatcagatttgttacagtcttggaagaagctgtatattctctactccatatatatgcactccaaggattgtcacaagtaactccattgaattctttaatcaaaaaacctttaaagttcaattctactgctttttctgcggctttcttcacttctgtcaataatgctgttttatcttctgtaacagctaattgatgcaataaatagcgagctttcaaagcgtaagctgtagccatccactgttcattatcatttccaaaagcaatatcctgatttccggcagactctaaatctttacctttttcaagattctttatagcatcttcaagggtatttaatatacctgtataaacatctttctgtgcatccagtttgggttgaaggttttcttggccctgtaatgcttcgctatatggaatatctccatgcatatctgtcaatattccaaaattcaaagcttccaaagtttgtgccatacccaataagtcatatttttcggcgttaccttgggttcccgtcgtgattttttcaatcatttggcggatgttcataagatttccataggttgcattccatacgttattgaaagtcgtagatgctgcccattccgcagagttacgtaactctgctctcattaactggttatttccaactccaatttcttgttcggtaagagaggaaagataaaaagcatagtctcctgatactgtactgaaacctgtagccataattgcatctgtcagctgaagtgcggctgatacattttcaggagaaggatgttggttatccttattgatgtcatccattatatcctcggtacaagatgtgagtccgagaaatgcaatagataaaacggataatatatatttcttcatatttgaatcgtatttattttagaatttaatagtaagtccaccaccaaagcttgaagtattaggaacagagaagcgttcaaaatatccactcatgttattgttaccctgtgatgattccgggtcaaaattcggcagattagcccagattaagatattacgagcaaatccatatacagaaatgtcgaaaattcccatctttggtaattggtatgtcagtgttacatcgcgcaattttacgaagctagtatcataaataccagattcagaaatgttgtaatattcctgataataagcttgcttgctaacttcaaccgtgttcttttctcctgtagcttcatcaataccttctgctaccattgttccttcatggtatggaagagattcttttgttgcaccgaaatagtttaatgtcatgtttgtaccatgatacatttttccaccttgctgccagctccatgtagtagctaaagaaagacgtttgtagcgtccaccaaaagtgataccagttgtgaaatccggtgaacagttacctaagttctggctatctcctgttgcttgtggtaagccattaagcaataacatgtttccttcgctatcacgcttgaatgcagcaccatagatattaggataagtacatccagcctgtgctctaacctgcggctcaacaaatccacccaacataatagattctacacccggtgcaagttcaataaccttgttgaggattctggtaaagttgatacccaaattcaaatcataatctttactttgcagaatagctgcattgatagagaattcatgtgcatgggtacgcatctttccggcatttgtcatcatatattgataacctatagcaccatctgtcggtacagagaatatctgatctttaacattctgtaaactataggtatattccattttaattctgctgttgaataaatgcaaatcaataccggcttcatagtttactgtattttgcggcttaagattctcattatatactacataatatggtacgtatgatgaaacaccacttggaagcggataagataccggagtgtaggccaagaaacctcctccgtaagaaggtgtatagtagaagttgttgtaataagtaccagcttgacctacctgtgcaaatgagcctcttaatttaccatagttgattacactgttgccttccaagaatggtaatttagtgaattcccatcccaaagaaactgaaggatagaagaaactacggcttcctctaggcatggtagatacgtagtcattacgtcctgtaacagttaaatacaactggtctttccaggatgcagacacacttccaaagaaacctacagtacgttctcttcttgtatattcattagcactggccaggttagtagcatttccaatggtcgggaatcccgggaaattaaaattgcttgcataatagtcccaagtacgaatgttttcgtcattaaattcattacctaagatgatgttcaatccccattcgtcttcattaccaaatcgaccgtcgaaattaatggtaaacaagttgttgaaaacattgtgttgtgaaccataatttttaatttcgccaccgagtagggcacttgttgtacccatttcttttacatcggcataattagaagtccaaatatccaaacctgcttgttcacggaacttcaaagtaaatccatctccccaatttaattttggctgatattcaagatatgcattgccaaaaacacggtttgtgtgctgcaagtattcattatgatcagcccaccaatatgggttcacaaatgaagtagaacggaaaagtacttggttcgtgatatctccaggtgcgtgtgtcgggattcctttcagatcatattcagcaggagcagaatatacgacgttcattataccatcattagcaccaggagcagatgtaattttggttgatgaatagtttgcagaaaaaccagtattccattcttcattgattttccagtcaaccaaacctctggctccccaacgattcatacctgtagatgggatgataccattttgataagagttgtttaatccaaatgaatagtttaccccgttgagactttgtgatatatttacatttgtgttttctgtaaatccagtacctaagaaatcacctacgttgtcataaatttgcggagttgtccaaccatcaagaccagcttttgcacgttgagtgttataatattgaccttcatgtttaccaaattctgcagtatattggttgtctgtatttccaccataaacaggatcatttgccaaatctgtgattttaggtccccatgtgctggaagatgaaggattgtatgcgctgattttatcgccttgtgcatatactgtttgacgttcaaattttctagaaacacgctgagcactcatgttagtagaaatagtaacacttggcttattcaagttgtttttagaaccgcgttttgttgtaattacaatgacaccattagatgctcgaataccatacaatgcagaagcagcctgtcctttgagtacgttaatggtctcaatatcttcagggttaatatcaatactacggtctgcatagtttgctcctgttacagaactaccggtatcaaagtctgctgatgtattgataggcataccatcaattacatacaaaggttggttgtttccatcaaatgaacgggctccacgaatgatgatttgagaagaggcacccggagcaccagacgattggcgtacttcaacacctgtcagtttaccttgtattgcattagccagtgatgttgtaccacttttattaagttggtcagattttaaatcttgtgcagcatatcctaacgccttacgatcgcgtttaatacccattgctgtcacaacaacttcatcaagctgctcagcatcagattttaatactacatttacaattggtttaactttcacttcctgcgactgcattccgatgaaagaaatgaccaaagttccggcggaacttggcacgttagtcaacgtaaaattaccatcaatgtcggtaacagtacctactgtagtaccttttaccaatactgatgcgcccactacaggtaaaccatcctcttcagaagtaacattaccagttacctttgagatttgagcgtttaccagaccaatacctatcatcaggcaggtcattaacagcatcaattttcttttcataaaaatctctcttaaagtttaactttacattaataaaaattcattcactctaacaagacgcaaaagtagtaatatctttttaaatatttataccattttcaataaaattcccccaaaagcttgctttttaacacttatacctgccactttcatgcaaaagtatgtttttataaagtaaatgatatgcatttcttgtatctgggatttatcatcgaatcaaaataatgaatcctttttgctagatacttgttagttttaatttagctaaaatagacgttatataagtaataaacttcttcttattgcatattatctgcatattttcttaaaaacaacatagtatgaacaagatttatttcagattggtctacaatcgtaaaaagaagttaaacaaatcaggtaaggctcttattcaagtggaagcttacagaaatcgtaaaaaggtttacatttcgacaggaatatatgtcaatccaaagcaatgggataaccatcatagtagaattatccaacatccgcattctgaagaattaaaccgaatgttagaagaatttattttgcaattgcaatgggaggaattgaaatcatggaaacgcggtatctatatcaacttgtctgcttttaaaactttcaaccaccaaaatgatactgaagaaatgacattcttactctttggtagaaattgggtagaacactcattgcgtaaagatgctaccaaaaagaatcttttaactactttggatttactcaatcgctttcgttcctctattgaatttgaagatataacctatacatttcttcttgaatttgaagatttcatgcggcaaagaatgtatgaaacaaatacaatcgccaagcacatgagacaattacgcacttttgttgatgaagctatcaaaagaggatatattcagccagacgattatccgtttagaaaataccaaataaaaacgactcaaagtaaacatagttttttattgcctgaagaaataaggaaactggaaaaactggagctttcatcgtgtccaaaatcattaatgcatagcttaaaagcgtttttattttgttgttatacggggattcgatattcagactttgtacttcttaatgaaagtaatattgttacgataaaaggagagaaatggcttatatttaaaactgtcaagacagatacaaaagtcagcataccattatatcttctctttcaggggaaagccctccgattattgcaagaatatcatcagaatttaagtgatttttttcatataaaatcgaattcttccgtaaataaagatttaaaaaaaatcggtgtgttagccaagatagaaaaacacttttcatttcatacagcccggcatactaatgctactcttttaatttacaacggggctcaaataactacagtccaaaagctattggggcatcaaagtgtaaaaactactcagagatatagcgatattttttcaggaacgattgtaaaagacttgaaaaaatgtaagttctaatcattaatctaagaatgtaattattaatttaagaagacgctctgttatagtttatattttacggtgcagagccgtacgttttccgcatgagaaacatacggctccgcatcgtaaaacgtatgtttctcgcacgagaaacataatataatattatgcattacatcatctatataaatacattttctaatcctattagtaataataaggtagaaaaactatataaattttgcagttataactgatttaaaatggctcattaataaattggaaataaatttaccatttgataatcaacgaattaaagctaatatagttccgccggaactttggtcatttctttcatcggaatgcagtcgcaggaagtgaaagttaagccaattgtaaaagtattattaaaatctgacgcagaacaacttgatgaagttatggttgttgcgtatggcactgctaaaaaatcttcatttacaggagcggcatcttctgttgatggagcaaaagctttaaaagatattcctgtcacctcttttgagcaagctcttgctggtacaactcctggattaacaataaacagtaacagtggacaaccgggcgcggcattagaaattcgcgtaagaggtacaggctcaatgaatgcaaccaatgagccattatatgtaatagatggtgttcccgttgtatcaggagatgttgctatatcagctgtaacagacgatagtaaatcatttaatattatgtcatctattaatcccagtgatattgagaatattaccgtattaaaggatgcggctgcagcttctttgtatggttctagagcagccaatggtgtaattttgattactacaaagaaaggaaaagccggcaaaacacgtatcaattttaaagccaattggggattctctgattgggctatgaaaaatcgtgaaaatgtaaatggaactcaacgtagagaactgacatacgaaggagcctataatgaagctattctttatggtattcctgatgcagacggaaattacactcctgcaacagaagaacaagcaaaagcgtatgctcaagtagcagcagacacctatgcgcctgactataatgaagactgggagtctgctttattccgtaaacacggctcttcacaaaactacgaattttctgcacaaggtggtgatgatcgaaactccttcttcgcttctttagcatacaaaaaagaccaaggtaaagctaacaactctaaaatggatggatttattggacgtatcaatgcaactcaccgttcggcagataataaatggcaaatgggagcaaatatttcattgtcaaaacaaaaatcctctgttgttagtgaaggaacagcttttgccaatccttttttcttgcttaactatgtgattacccctaacatacgaatctacgatgacgaagggaactatgatatgtcaaatcctattattcaggcttatttccctaaatctcatcctatagaagatttacagaaagacaagaatgagtcaaatgttttcagaagttcgaataatttatgggcctcctatgagattattgatgggttaacgctaaaagaaaatgtcagctatgattatatagctaataaatcattaacctactggcctatggattcaaacaatggtagcgatttaggaggtcttggatctaactatattttgaatcaaaacaacatctattcttctaccacattaaattatgtgaagagctttaatcaaaaacataatttggatgtacttgtaggatgggatgtagatgaccgcagaatagagtatgtaatggcatcacaaaatggatatccgcacaataaattgccagaatctattaatgctgctactccaatggaaggtatggcgtattacgaacaagaccatttgttgtcacttttgtcacgtgtaaattatgattttgacaataaatattatgtatcagccaatttccgtcgagatggaagctcacgtttaggtgcaaataatcgatgggcaaacttctggtctgtttctgctgcttggagaatgacacaagaagaatttatgcataatctgacatggttaaatgatttaaagataagagcatcttatggtatcaatggtactttgcctagttcatactacagccatctaagcttgtatggatatggttacaattaccaggataaaccaggctctgctccaaattctgttccaaatccagacttgtcatgggaaaaaaacaagaatctcaatatcggatttgatgctcgtttttttgaccgtttaaacattacatttgattactatacacgtcgtacaagtgatttattgcaagatgttcccacatcaatggctgtaggttttcaaactatgctaaaaaatgttggtgaaatgaaaaatcagggtgtagaagtagacatcaatgtggacgtgttcaaacactcacaagtaagatggaatacaggtctagcattgtcacacaatagcaataaagtaaccaagctttatggaggaaaagatatcattgatggtactagtattattcgtgaaggagaatcatactattcatggtggagccgtgaatgggctggtgtagacccacaaactggtgaagagcaatgggtattaaatacagtaaatgaagatggcagtataaacagagaattaactaaagatcctacaaaagctcaacgtgtaattatcggcaaaccagacccaaaactaactggtggatggagaaactctgtttcatggaaaggattagaattgagtatgcttttcaatttctctttaggtggaaaagtattcgacacttggagaacaagtcttacagatacagatggatatcaggtatggtataatatgtcaaccgaacagttagacagatggcaaaaacctggtgacgttacagatgttcctcgccgaatcaataattacaaatggggaaattatgggagctcacgttttatgaaagatttgaactatttacgtttgaaatcattaagtctttcttactcacttccacaaaaatgggttaacaaagcacagttaaacaatgttcgtgtatttgtctcaggaacgaatctactcacttggacttcatataaatatgcagatcctgaaatgccagtaaatggaattccaacacttggacttcctaacttaaagactgttacatttggtgttgaattaggaatttaataaaaagaagaaacaatgaaaacaactatacatacaatatttgtgaccttgctgactggagttacgttgttatcttcgtgtgatgattatctgacaacattgcctagcaattcgttagttagtgaaggagcaatcaccacggaagaagatacgagaacagcagtgaacggactttatcaagggcttatttctgtcgatggttcatactattacggtacagatttcattactcgtccagaagtgggcggtgaagatatacaaactagaatggttggagaccgtacagaaaacttttatcgttttaccgataggcaaaataatgctagagaatcactttggtctgtaccttatgtagtcataaatcgtgctaatgtcctcttagatgctattgaatctggttctataccaatgacagatgtaactaagaattcaaagggggaagctttagcaatcagagcattagctcatttcaaccttctaattacttatggtacaccgtatcaaaaagataatggagcatctttaggagttcctgtgataacaaccgtacttgatgctgcaagtttacctgagcgtcttactgtagcacaaggctatgaagcagttttaactgatttagcagatgctttagattttataagtgaagataaaacatacggtcacataaaccgctggggggtaaaggccttaatagctcgtgtcaatttatataaaggtaattatgaggaagcctataaatacgcaaaagatgtcattgataatggaggatataatctagtccctaacgctgaatatatcaacatgtggggaaaacgtgaaaatagtgaatctatttttgatttagatttatcttctactatgtatggcggaagtagagagcttattggatctcttgttgcaccaagttcatacggaacaatgattgcaacaactgatttcctgaatttactaaacgaagatccggatgatgtacgattgggattattgataaaagataaagatggacagaagcgtgttgtaaacaagtatccaggacttgacggaaatatttttgtgaataatgttagagtaatccgattgtctgatatttatctaattggagcagaagctgcattaagaaaaggcactcctgatcaaaattctgctgatgaatacttatatcaaataagacatcgtgctaatccaaacaacacaaaaatcacagcaactcttgatttagttaagaaagaacgtagaaaagaacttgtgatggaaggtcatagactatatgacattttacgtgtaggagatactgttgagagaaaaggaggtactcatttcttgaatggagaagatttaataaccgttaattggaatgattatagaactattatgcctatccctcaggcggaaattgatgctaatcctcagattaaacagaatccctcatattaatagattgagaagtttttcttgaatttataatatatagaagcaaaaagcattgtcttcttatttataaattccgagaattattataggaaacttacccaagttgcgtagcgtattcttgggtaagtttttttcttagtacgctctctattttattataagacattttctttaaactacttaatatataagcaggtggctcaatatatattgttgtaaaatctatgaagaaatttcatactcttaaaacaatataaggcaggaaaacatattttattgacaaatgaaaacgcgtttactgaataaatgtatggaattttatttgtcttgtatgactcaataaattcgttttgagctaatatattcatctaattatataaaaatgacttattcagagtataatcttggtagaaaatccgtatagaatatcagtttacaagccatcttgatttacaaatcttatttaattgaataatttctatttatttatagatcaataatttataatactttatagttccgctggaactttggtcatttctttcatcggaatgcagtcgcaggaagtgaagattaagcctatcgtaaaagtggtgttgaagtctgatgctgaggtacttgatgaagttgtggtaactgcgtatggtacttctaccaaagggtcatttacaggttctgcagcagtgatgaaagctgataagattgagaaacgtcaggtgtcaaacgtatcaaatgcattggctggagctgtagcaggtgtgcagattttgagtaataacggtcagccgggtgaagatgcaaaagtgcgtatccgtggtgtcggatcaatcaatgccggaacagacccgttgtatgtagtagacggtgtgccttatgatggagatttgtcatctatcaactctgcagatattgaatcaatgacagtgttgaaagatgcggcttctacagcgttgtatggtgcgcgtggtgcaaacggtatcatcatgattactactaaaaaaggtacttctggtaaggcacgtgtaaacttcgatgcaaaatggggtgccaactctcgtggagtaaagaactacgatgtgctgacaagttcaaagaattatctggaaaaagcttacgaagctatctataatggttatgtacagaccaatggcatgactccgcaggctgccaatgtagctgcaaacaatactttgctttctgctggaaatggtggtgtaggttatcagatttatacagtacctgaaggtcagttgctgattggtagcaacggtttgctgaacccgaatgctacattgggctatacagatgaatatggatattattatactccggataactgggctgatgaaacatttagaacatctcttcgtcaggaatataacttgaatgtgtctggcggtaacgataagtctactttctacatggctttcggctatttggatgatcagggtgtaattgaaggttctggtttgactcgtttcagcggtcgtttgaagggtgactacaaggtaacagactggttgaaagtgggtgccaacatgaactatgtaaactcaaagagtaactatccgggcgatcaggataatgcatcatcttccggtaatgctttctatattgccaataacattgctccggtttatccgatgtatgtacgtggagctgacaaacagattatgacactgaacggtcgtaaggtgtatgattacggtgatggtgtaagcagtccttcatcacgtgcatttatgtctattgccaacccggcaggtgaccttatttataataagactgaatttttggctgacgtgctgaatgcaaactggtttgctgaattgactccgattaaaggtcttaccatcagcgcacgctttggtatgaatatcgacaatacacgttacaatgatttgggtaacgcatatatgggtcagaatgcttcttatggaggtaatgcttatcaggctgcaatgcgtactttcggtttcgaccagcagtatgtagctaactatcagtttgcagtgaaagatgtacatcattttgatattactgccggttatgatggttattcataccaatatacagaattgacaggttctggtcagaatctgtatgaccctgaaagcttctatattagcaatacaattgataagaagactgccagcggtatgaaattgacttatgctactgaaggtttctttggtcgtgtcaactactcttatgacgataaatactttggtaacgtttcttaccgtcgtgatgcttcttctcgttttgctcctgaaaatcgttggggtgacttctgggctgcaagtgtggcttggatgattacacgtgaagatttcatgaaggatatcacttggattaacatgttgaaactgaaggcttctttcggtcagcagggtaacgatgatatcttgttcccaggtggatatactgtaggagtgatggagacagctaaaaactattatccatggatggaccagtataacatgactggtgcagacggtgtgttctctgacggtacgatgattgcaaagggtaatcgcgatttgacttgggaaacttcaacttcttataacgtaggtattgattttgccttgttcaataaccgtttgaacggatcggctgaatacttcggtcgtaagtcaagtgatatgctttacaacaaaccggttgccggaagtgtgggttatacttctattccgatgaacgtaggttctatgaccaactctggttttgaattggatttgacttatttgattttcaaccagaagaactttacttgggatgtgaatttgaatgccactttcatcaaaaataaaatcaacaagttgcatccggacttggatggtcagttgattgatggaaactacatttacgaagaaggtgaatcaatgtaccgtatgtatttggtagattatgctggcgtagatccagaaacaggtttggctcagtattgggcaaaagatgacaagggtgagttgtataaaacagacaattatgcattagctcagactacaaacaaggtggccacagacaacttgatgccgaaggtatacggtggtttgggaacttctgtacagctttacggttttgatgcttctatccagttgtcttatcagttgggtggtcagatttatgactcaggttatcgtttcatgatggctggaaaaggtgacggacagaactggcacaaggatatttacaatgcctggactccggaaaataaatatacggatgtacctcgtctgaatgcgcaggataagtatacaaattctacttcaactcgctggcttgcaagctctaactacctgagtgtaaacaatattactattggttatacacttccgtctaacttggttcgcaagatgatgctggaaaaactgcgtgtatatttcactgctgacaatgtaggattgctttctgcacgtaaaggtcttgacccacgtcagagctatacaagtgctactacatcactttatactgctatccgtacaatttctggaggtatcagccttacattttaattaaaatataaataagaaacagatatgaaaacaaaatatatttttgcttcattgcttgtatcttcactggctgtgactggttgccaggatatggatacattgcccgatggaggaatcgtgacagactctcagaaggagaccgtttctacactgaatcctgaacgtggagtggcaaaagttaatgcgattttctctactttcaaccaggctttccctaactcaagtgcattgggtgctgaacgtcataacgatattggttatcctactgtcatgttgtgtctggattctaatacagaagacgtagtaagtgataataacggttataactggactggatatgacttgacatttgaagaccgtgaaaatacttccttggaaggacaaatggtatggaatgacttgtattctatcgtttttgctgccaataatgtagtaggaagcattgacgaaaaaacagaagatgccaatgaacagttctacctgggacagggactggctgcacgtgcattctcttattgggtaatggcacagttgtatcagtttaactataaaggtaatgaagataagccttgtgtgcccctgattacagaaaagaactcggaggatgcttctgtgaatggttgcaagcgttcgtctgtaaaagatgtgtatacacagattgaatcagacttgaacaatgctattaatttgctgactagtgcagagaaaggaaaagtgaaacgtgcagataagcgttatatcagtctgtcagtagcttacggacttcgtgcacgtatgtatctgtcaatgcatgaatatgctaaagctgccgatgatgcggcaaatgctatcaaggcggcaacaagtgaaggtattgctatcgcttctcgtactgcggtaggtaaaccgacattttggagtgtagatgaggtgaactggatgtggggtatcattgtcagcgaaacagatgacgtggtagatacaggtatctgtaactggccttctcacatgggatcactgagctatggatatgcaaactattcaggtggtcgtcagattagtttgaaattatataaggagattgatgatgctgacatccgtaaacaatggtggttggatgccgctgcagaatctgatggtttcttaagtgacgaacaagctgcttttgtggcaaaacagggttacaagccttatactcaggtaaaattcggtccctataatgatgtggtaggtactactatcaatgccaatgatattgtattgatgcgtattgaagaaatgtatctgattgctgcagaagcatacgctgaagctggaaatcgggctgaaggtgaaaaatatttcaaggaattgcttaacaaccgtttgtcaagcggatcacaagcttatttaactgactatgcttctaatcctcaggaagctgtttatttccagcgtcgtattgaactttggggtgaaggagtaatttggttcgatgtaatgcgtcttaacaagggagtagaccgtcgtggagctggtttcccgaatgcagaatgtgtatttaatattgcaaaaacagacgatatcttgttgtggcgtataccggaagctgaacttcaggctaataaggcattaactgcagaagatagtccggcatggactttaccgaaaccagttgcagatgaataataagttagattaaagttaaaaactaagagtattatgaaattaaataaattctttttcggattattgatgactccggccgtaatgatggtaggatgcagcgattatgaagatacggaagtggcaagcccggaagcagatgcggatgcaattggtgcttattttgaaagcagtgcagtttctgaacagttgtcaccggggcaaacatcttttaagattgtgttgaatagagcttctttttctgaagctgtaaatgtaccggttaaggcaacagatccagataactttttctctttgtcagataatcagtttgtgtttgatgctgagaaacaggttagtagtccgataactgttactttcaatcaaagcgtagtagagcttcagaagacatattctttgaagttgcaggttgcagacggagtgaaagatcatttgtatggtgcaggttatacagatgcaacctattctatggtgattgattatgcctggaagagtgactcattggcatctacaatggtgaaggatgaatatgctggtacatttgataaagaaggagctttagctgcagtagaaattgcaaaagattttgaggtagacgaagaaaaaccatcacctgattatactaagaattctttggtgcgtatctctagtttctttgctactattggtaagtcgaaggcagctggagaagaccacattcagtttgtggtagataaggatcataaaaatcctcaattcttaacaactgattacctggctaataatgaaatttctctgaaagtcaatacaacaaaattggctacaggaatgactcagaaatttgctgaagagaaggagtatcctatctgtatggacttggtaggtattaacgtggaagcagcaactgctgaggctaaaacggacaacgtgacttatcaggtaacatatgaactttatgcatttgatgagaaagctgataaaaaatatctgctttcaacagaagatgatactgtaccagtagaaggtaatactcaatataaagctaaatttgaagtgaaattcgtaaaagcttctgctgaataatcgttattatagctgaaataataaaagaggtatgtcctgtgtggatgtacctcttttttcgtcttattcacttaaaaactggtctttttgttagaatgaacttcttaataatacaaaataattgcaattttattctatttgtattcactttttatgcggttgaagaagtgaaagcaagttcttaaaaaccatctgtttatctattttgatatcgttttactccttataaataaattttagtgtaaaattgcccgctgttttataatttctctttattttcttacattcgcgccccgtttgtgataaatgtattagactaacttaactaaattaaaagagagattttatgaaacaaagaatgacgttgttcatggccattcttctgatagggattggtctgtcaaacgcccaagtttctcaagtgaccggtaatgtgatgtcggaagaagacggattgccggtagtgggcgcatcggtgttggtaaaaggtactactgtagggacagtgaccgacattgatggaaactttacaatttctggtgtgccggcttcggcaaaaactttagtggtttcttttatcggtttgcagagccaggaagtggctgtaaaaccggtggtgaatgtagtgttgaaatcggatgcacaggctttggaagaagtggtggttgtggcgtatggtacgcagagcgcacgtacggtgacagcttcagtagcttcaatccgcaacgatgtgttaaaggacgtgcctaatacaagcttggaccagatgatgcagggacgtgcctctggtttgaatgtaacgactccttcaggaggagtaggtcaggctcctgtggtacatattcgtggtgtaaactcgattacttcgggtacttctcctttgtacgtagtggatggaatgccgattcagtcgggtgatttgggcggaggattgggtaatgccaatgcgttggctgacattaatccggctgatattctttctattgacgtgttgaaggatgcggcggcagcagctttgtatggttcacgtgcggcaaacggggtcgtgctgattactaccaagcagggaagcagcggaaaagcaaaagtaacgtatgatgcttctgtcggtttctccaaccggacgaagttcattgatatgatgaatgcacaggagtatgtagacttcaagaatatggcggttcgtaatgcatacggaacagatgtagcagctgaactggctgctatggataagacattcatcgctaatcctgcttatggtgataaggcatttaacttgatgccgggagtagactctaactgggcagatgctatttttcagaatgggtttacacaagaccagactgtagccgtaagtggtggaacggaaaaagtgaaatattatatgtcggctaattacaatacgcagaaaggtattgtagtgggcgataactataaacgtctgggcggtaaggctaacattgtggctaacgtaacagactggctgaagattggtatgaactcgagcgtgaacgtaagttctacatcgcaggtggatgcggcacgtaacggttcaaactttgcagtaggtggtttcccgcgtatggcgctggctaactctccgaatatacctatctatgatgaaaatggcaaaggttattatgaacattcgttaggtgtgttgggttatggacctaatgcggtaatgaatacattttcgaatccggtggcattggtggaattgggtaataagaccaacgtggatgtaaaccgtattttgagcagtttctttgcagaagttactcctgtgaaaggtcttacattgaaaacccagtataatattgacgatgcacgtatcgaaaactctcgtttctggtcacctaatcatggagatggagtaaataaaggcgggtatgcgttcaatgcggcagtgcatagcagtatctggacctggacgaatacggcaacgtatgattttacggctaatcgtcatcatttcaatttcctggtgggtatggaagctactgaaagcagctacaatgaatgggatgcttctcgtacagaattgcaggatgataagtttacgaacttccagggaacttttgccaatgccacagcttcgggtagtatttccaagagctctatggtttcgtattttggacgtatcaactatgactttgcatcgaaatacatgttctctatcaatttccgtcgtgatggcctttctgcattgagcaaggataatcgctggggtaactttggaggtgtttcagcggcatggcgtgtgtcggaagaagctttctttgaaccgctcaagcatgtgattgaagactttaagatcaagggtagctatggtgtggtaggtaatacgaatatcgatgactatgcctcacgttcgtattattctccttactattacggttctcagggaagttatcgtttaagtaagattgccgacccgaatttgaaatgggaatcttcagaaaagtatgacgtaggtttcagtgcacgtgtacttgatcgtatcgatattgattttgattatttctatacgaaatcttcagacttgattctggatgtgccacaggctccttcgaaaggtcttccaggaaatatcctgacaaccaatgctggaaagatgacaaactcaggtattgagttgacgatttctgcggatattttacgtgacggtgcattcaaatggaatacaagttttaatattacgactactcgtaataaggttgtatctctggctaatggtttggataatattatcaaaggtgatgccactggattggaaattacaaatatcacagtacctggcaagtctatcggtcagttgtatctgacaccgacaggtggtgtagatccggaaaccgggttccgtgtgttctatggagagaatggagaacgtgtgctgtataatcatgcctcgaaagcaaaatggatgcttgaagatggtacgccttatgagggcagcttgaaaccggtgatttgcggaaatacactgccgacatggtatggtggatggagtaataacttctcttacaagaattttgacttgtctttgttcttccagttctcaggtggaaactatatttataatggtacgaaggcgacggtaagtgacatgcgttactggaataactcgaaggaggtacttcagaattactggactccggaaagaaagaatgccattttcccgaaaccagtgtatggcgataactattctaatggttcggccatgcctatcagcgagtgggtggaaaaaggtgactatttgcgtttgaagaatatctcattgggttataccttcaatacgaagaattgggcgagtgccatcggtatcagcaagttgcgcgtatatgcacaggtgcagaacttgttcgtaattacgggctattcgggtatggatccggaggtgatgtcgaatacgaccaatgctactctggctccgggtacggataaaaatactttgccacaggcacgtacatacacatttggtgtaaacttggcgttttaattgttgaatttttaaaagcagattcgaatgaaaaaatatattgtatatgctatattgatggctggaaccacgttgagtagttgcagtagcagtttcttggatcaggaaccacctttgtacattgagccgggagatatttataatgatgcaaatcgtttggaagcagctgtattaggcttgtatggttcgataaaaaatgatgcgtcggattccttcatgggaggaaaaacctatctggtgtttgataaccgtggagaagatattgtaaattctgacccgaacttgattactttggccaatacttataagtttaatgtgggcaaaacagatgcagaaaatacggtgacctggagcatggcatacgctgccattaaccgtgtcaatattttcttggatgagttggaaggtgctaaagctactgctggagaaaagtatgagcagtataaagcggaggcaaagtttgtgcgtgcatttgcttattactatttgaataatctgtatgctacgccctacgtaattaatccggatgcgaaatctgtgcctttacgtttgactccggaaaagaacggtgaacacaatgcgttgaaacgtgctacagtgaaggaggtttacgaacagattctttcggatttggaaaatatcagtgcgttgccggtaaaagcaaaagcagatgaaccgactgtaactcgtgctacacaggcggctgccaatatgttgaagatgcgcgcgtatatgtccatgaataactggacagaggcggtaaaagcaggtaagctggtgacaggctacgaactgactccgaagtttggagatatgttcaaggctccttattatacggatgaaaccatattctctttgccaatgaaggaaacaaaccgcccgaatacccagcaaggattggcagaatattattacgctaagaatacgattttgtgggtagacgtggagaacggtatcatgggcaagccgaattacaattcagctgatgatgcccgtgtgcagatgaagaacgaaaaaaatcagttgctgaagtttacggatgctgcacagaaactggattgggcaccgattttccgttatgcggaaacgttgttgaacttggctgagtgttatgtaaatctgggtggaactgaaaatgagaaacttgccagagaatgtctgaaacaggtgagattccgttcattaccggagacaagcaatcagttggatattgatcatttgtctggtgaagatttgaagatggcggtttataacgaacgtcgtctggagtttatcggtgaggcgatgcgaggcattgatgtgttgcgtcgcggagctaactttgaacggaaaacacagattactccgcaaagtagcggatatgtttggccgattccacaaagcgaagaattgatgaatccggatttgaataaataaggaagaagtaaaaagagcgtatctgtaatgagatgcgctttttttatttatatttgcgctctatagaatttagatttatactgaatgaaagaatttgtaatatcagaagcacagacagaaaaagctgtgctggtaggtttgataactcagactcagaatgaacgtaagaccaatgaatatttggatgagctggctttcctcgctgagacggctggggcagaggtagtaaaacgttttacacagaaactggatacgccgaactcggtgacttacgtgggtaaaggtaagttgcaggaggtgaaagaatacctggagttgcagaacgagagtgaagagacggaaatcgggatggtgattttcgatgatgaactttcggccaagcaaatccgtaacattgagaatgaactgaaagtgaagattctggaccgtacttcactgattcttgatatttttgcgatgcgtgcacagacagccaatgccaagacgcaggtggaactggcgcagtataagtatatgcttccgcgtttgcagcgtttatggacgcacttggaacgtcagggtggtggttccggtgccggaggtggtaaaggctctgtaggtttgcgtggtccgggtgaaactcagttggaaatggaccgtcgtatcatcttgaatcgtatggctctgctgaaacagcgtctggcagaaattgatacgcagaagtctactcagcgcaagaaccgtggacgcatgattcgtgtggcattggtgggatataccaacgtgggtaaatcgacgttgatgaacctgctggccaagagtgaggtctttgcggaaaacaaattgtttgctacgctcgataccaccgtgcgtaaagtcattatcgaaaacttgcctttcttgctttcggatacggtaggatttatccggaaattgccgactgacttggtcgattcgtttaaatctacgctggatgaggtacgtgaagcggatttgctggtacacgtggtagatatttcacatccggattttgaggaacagattcaggtggtagagaaaacaattgccgatttgggtgcaggtggaaagccgagtatgattgtatttaataaggtagatgcctatacgtatgtagaaaaggccgaggatgaccttactccgaagacgaaagaaaatatcacgctggaggaactgatgcatacctggatggcgaaactaaatgataattgtatctttatttccgcacgtgagaagaccaacattgatcagttccgtgatttattatataaaaaggtaaaggaactgcatgtgcagaagtatccttacaatgattttctatatcagacatacgacgaagaataactacaagaaaatatgacacaacactatcgtttactgacaaaagaagaaatcgcacgactggaggcgcagcactgtatagcttccgattggagtggtgtagaagtggccgatgattttcatacggattatattcatcacacccgtttttcgggaaaagtgcgactgggcgtttttgaaaaagagtttactttggctggtggaatggccaaacattctggtgtatattatgcaaccttgcacaatgtaacggtgggtgacaactgctacattgagaatgtaaagaattacattgccaactatgaaatagggcatgatacctttatcgagaatgtagatatcatcctggtggattgccatagccgttttgggaatggagtagaagtctcagttttgaatgagactggcggacgtgaggtgattattcatgaccgtctttctgctcatcaggcttatatcatggctctttatcgtcatcgcccggtactgattgagaaaatgcggaagattattgagtcttatgcagagtcacatgcgtcagatacgggtactatcgggagtcatgtaatgatagtgaatgccggttacatcaagaatgtacggattggagattattgtcagattgagggtgccggccgtttgaagaatggaagcatcaatagtaatgagcatgcaccggtgcatatcggttacggagtgatttgtgatgattttatcatctcaagtggctcacacgtagaagatggcacgatgcttacacgttgtttcgtggggcaggcttgtcatttgggacatacctattcggcttctgattcattgttcttcagtaattgtcaggaggaaaatggagaggcttgtgccatttttgccggaccttttaccgtaacgcaccataagtctacattgcttattgccggcatgttctcgttcatgaatgcaggttcaggctctaaccagagtaaccacatgtataagttagggccgattcatcagggggcattggaacgaggtgctaagaccacttctgattcttatatcctgtggcccgcccgtattggtgccttctcactggtgatgggacgtcatgtcactcatccggatacttcgaatctgcctttttcttatttgatagaggaaaagaatacaacttatctggtgccgggtgtcaatttgcggagtgtaggtacaattcgtgatgcgcagaagtggcctaaacgtgaccagcggaaagacccgaaccgtttggaccagattaattataacttgttgagtccgtacactattcagaagatgatgactggccgacagattttgaaggaactggctcgtgtgtcgggggaaacttccgagatttactcttatcaaagtgcgaaaatcaaaaattcggcactgaataagggaatcaagttttatgagactgctatccataaatttctgggaaactctgtcatcaagcgtctggaagccattcattttgcttcagatgaagaaattcgtgttcgtctgcttccggatacgccgattggaacaggagaatgggtggatatttccggactgattgccccgaagagtgagatagaacgcctgatggaggatattgagtgcgaccgtttgaacagtgtggatgagatacacgaccgttttgcagagatgcacgccaattattatacgtatgaatggacgtgggcgtatgaaaaaatgcttgaattctatggcttgcaggctgatatgattacagcggcagacatcgcagctatcgtacgccagtggcaggaagctgtagtgggactggataaaatggtgtacgaagatgccaagaaggaattttcgttgacttccatgaccggattcggggcagatggaagcagtgaggaaaagatgcgtgactttgaagaagtgcgtggtgtgttcgaaagcaatccgtttgtgacagcggtactggaacatataaaggtaaaaacggagcttggaaacgaactgatagaacgtgtaaagaatttattgtaaaatgggaggtactgcgtatggaaagaatatgcagatatatatgtttgctttgcgtttgcttcatggctttgcagatgcaggccaatagaagaaaggtgatggaatctccgggtttcgtcttgtcgaatacggcggagatagaattcaaacggattatccaaaccagtgaacagactcaggtcgatgcagtgatgtatggtaagccgggaactccggttgtcatttcctcgaaagcggcattgaaatgggccgatggaggaatggcacagcttcgtgaggcggaacgtatttccattgatggagtgactgagccggaagtaatcgacgagaatgggactttggaagtaactctttctttttcgccggttccttcggatgtgcatgaagtagattttatcgagccggagatgggatggaacatctttggcatccagttgagtagggaagaaccttatgtgtatgtgcctaattaccttactacagataagccggaacggagcaatgaaattccagagccgggattggcagtaggaaaggctgtagtaaacggttatattttaggatatgatcctagaatgtcattgttcacggaattggaatatgaagacggtcttttccctaaggagtggaagcaaagcattaaagtccgtcaggatggctcgtttcatctggaagcagagttgttgcaaccaactttgacggcattgcggttgaacgaagcggttttgaaactgtttcttgtgcccgacgaagaggtgacggtgtatatcaatcttcctcgcctgagcatgtctgcttcccgtttgctgggtaaacgttacgagaaaaaacagaaggcctggtttgacggagcagctgagactattaaccgggagctggccagttccccttcttctgctgcactgaatgcctatcgtgctgtagaaaaaggtttgatggagagtccggaggtcgcttccaggttacaatctgactatgagcaggtgatgcccatctgtacccggattactgcttcctcttctttgtcttctgatgaccggaaagtgctgaaaacggtgaattttccggaaattcgtatgtatgtggaagctgtggcagaagcacttcagcagaatgccgaacggatggagtcggtgaaagaagcggtgattgcttcgctggatgcgcaggtagaaggagcggatattcttcctaagattattgctcctcataaagggcgtgccatcttgatagacttctgggctacgtggtgcggtccttgtaaaaaaagtatgcagtctatggtaccgttgaagaaaaatctgtcatcaaaagacatcgtatatatttatctgacgggaccttcttcccccgaaaatatctggaaatcaaatctgtccaagatgacgggagtacactatcggcttactgactcacaatggaagtacttgtgcacctcttatggagtaactggaattccggcttatctgattatcagtcatgacggaaaattgcagggacgttatgtgggattccccggggtagatgtactgcaaaaggacctgattcgtgcaatagaagagtaagaagaattacagataactttttgtaggaattaaggaaaaatttcaataatactttgtaactttgtgtccactaataactcacaattaatttaatgtattatggcaacacccgaattcaagtatcagccaatgtttgaacatggcaaggatacaactgaatactatttgcttacaaaagactatgtgtctgtaagcgagtttgaaggaaaacccatcctgaaaatcgaaaaagaaggtttgactgcgatggccaatgcggctttccgcgatgtttctttcatgttgcgccgctctcacaacgaacaggtggcaaagattctgactgacccggaggcaagcgacaacgacaagtatgtagctttgactttcctgcgtaatgcagaagtagctgccaaaggcgtacttcctttctgtcaggataccggtacagcaattatccacggtgaaaaaggacagcaggtttggactggctactgtgatgaagaagcgctttctctgggtgtgtacaagacttatacagaagaaaatcttcgttactctcagaacgctccgcttactatgtacgaagaagtgaatactcgctgcaacttgccggctcagattgacatcgaagctactcagggtatggagtatgaattcctttgcgtaacaaagggtggtggttctgctaacaagacttacttgtatcaggaaacaaaagccatcttgaatccggctacactggttccgttcctggttgaaaagatgaagactttgggaactgcagcttgtcctccttatcatattgcatttgtaattggtggtacatcagctgaaaagaacctgttgactgtgaaattggcttctactcgtttctacgataacctgccgactactggtaatgaatacggacgcgcattccgcgatgtagaactggagaaacaggtattggaagaagcacaccgcatcggtctgggtgctcagttcggtggtaaatattatgcacacgacgtacgtatcatccgtttgccgcgtcacggtgcttcttgtccggtaggtttgggcgtatcttgctctgctgaccgtaacatccgttgtaaaatcaataaagacggtatctggattgaaaaactggattcaaatccgggcgaactgattccggaagaattgcgtcaggctggtgaaggcaatgcagtgaagattgacttgaaccgtccgatgccggaaatcctggctgaactggataaatatccggtagctactcgtctgtctttgaacggtactatcatcgtaggtcgtgacatcgcacatgccaaactgaaagaacgtctggatcgtggtgaagacctgcctcagtatatcaaggatcatcctatttattatgctggtccggctaagactccgcagggtatggcttgtggttctatgggcccgactactgctggtcgtatggacccgtacgtagacttgttccagagtcacggtggttctatgattatgttggctaaaggtaaccgtagccaggctgtaacagatgcctgcaagaaacacggtggtttctatttgggctctatcggtggtccggctgccatcttggctcagaacaatatcaagagcattgaatgtgtagaatatccggaactgggtatggaagctatctggaagattgaagtagaagacttcccggcattcatcttggtagacaacaagggtaatgatttcttcaaacaaatcaaacctcgttgcactggcaactgtaagtaattgacacctctgatatgcttctttctgtaaaatgggagaggcataagaccatacaaaggatttgcaaaccgtagcctgtcgatggccggatttgcaaatcctttttctttcactctgcgctggcaggtttgtttcactatagtggattaacaatgaatattctacgtttttgtaaaaattggacgttgcccatagccatggcaatgggagtcattctgtactttgtgtatgtcaatatcccttttcttgcacctaccaagccctttgtggctcatgccatcgatattgtacagccggtattgattttcctgatgctttttcttacattctgtaaaatcaatgtgcacgatttgaagttgtgtgcctggcattggcgtttgctgctgattcagggagcaagtttcttgcttttgggattgctcctggtgattttcccggatttctcggctcgtatattggtggaaggagctatgatttgcctgatttgtcctacggctacagcggctgcggtggttacacgtaagttaggaggagatgcagcccatctgaccacctataccattttagtcaatttgctggcggctattttggtgccgctggtacttccattagttcacccgcatccggaactgaattttggcagttcgtttgcgctgattttgggaaaggtgttccctttattgctttgtccgttcctggcagccattttactgcgggctttacttccgaaagtacatgccaagttaggacagtatcatgaactttctttttatctgtgggctgtggcgttgacattggctattggagtaacggtgaagagtatcgtacacagtgatgtgtctttctggtaccaggccggattgggaggcgtttccttggtttgctgtgccctgcagttctatttcgggaaaaagataggacgtcgttacgatgattccatcagctccggacaggccttggggcagaaaaatacggtatttgccatctggatgggctatactttcttcactcctgtgacggccgttgcggcaggattctacagtgtgtggcataatgtagtcaattcctaccagttgtatttgcagcgtaaatcggagggagagtccgacgctttgaaaaattaacagcttgtctgtcattgctgtgctcggaaagttgtaactttgccgtcactttgtaatgtagaagaataaattcgcatgatttcaatagaaggactgaaagtggagtttggaactactccgctgtttgaagatgtatcgtttgttatcaacaaaaaagaccgtattgcactggtaggaaagaacggtgccggaaaatcgactatgctgaaaatcctggccggattacagcagcctacagagggagtggtagccgtacaaagaggcattaccattggttatttgccgcaggtcatgatactgagcgatacacgtacggtaatggctgaggccgagatggcctttgagcatatttttgagatgcaggaaaaactggagaaaatgaaccaggaactggccgaccgtacggattatgattctgaaagctatcatgagctgatagagcggtttacccatgagaacgaacgtttcctgatgatgggaggaaccaactaccgtgcagagatagaacgtacgcttacgggattgggattcaaccgtacagactttgaccgtcctacttctgaattcagcgggggatggcgtatgcgtattgagttagcgaaacttctgttgcgtcgtcccgatgtgctgttgctcgacgagccgaccaaccatctggacattgagagtatccagtggctggagaattttctgaagatgagttccggtgcggtagtactggtaagtcacgaccgggcattcattaacaacgtgaccaaccgtaccattgaaatttcctgcggacggatatacgattacaaggtagcttacgatgagtttgtcgtgctgcgtaaggaacgccgtgaacagcagttgcgtgcttacgagaatcagcagaaagaaataaaagacacggaagattttatcgaacgtttccgttacaaggctacgaaggctgtacaagtgcagagccgcatcaagcagctggagaaaatcgtacctattgaaattgacgaagaagatacttctacacttcgtctgaagttccctccttccatgcgctccggtaactatccggtgatttgtgagaatgtgaaaaaggcgtatggcgaccacgtggtttttcacgatgtgaacctgaccatccatcggggtgaaaaggtggcctttgtgggtaagaacggtgaaggtaagtctacactggtgaagtgtatcatggacgagattccctatgaaggaaaactgaccatcggacacaatgtacagattggctattttgcacagaatcaggcacagctgctcgatgaaaacgtgactgtctttgatactatcgaccgtgtggcaaaaggagacatccgtctgaagattagagacatcttaggtgccttcatgtttggaggagaggcttccgaaaagaaagtaaaggtgctttcaggaggtgaacgcagtcgtctggctatgattaagttgctgctggagccggtgaacttcctgattctggacgagccgaccaaccacctcgatatgcgttcgaaggatgtgctgaaggaagccctgaaagagttcgacggtacggtcatcgtggtatctcacgaccgtgagttccttgacggactggtgaccaaggtgtacgaatttggtggcggactggtgaaggaacatatcggcggaatctacgatttcctgcaaaagaagaaaatggagaatctgaatgaacttcagttgtctcaatctccgcagaccgcttcgcccaagaaagaagagcctgcagagagtgaaagcaaactttcgtatgaagcgcagaaggagctgaacaagaaaatccgcaagctggagaagcaggtggccgactgcgaggcaaagattgagaaactggaagagcaggtggcacaactagaggaacagatggctactcctgaaggtgcttccgatatgaagctgtacgagcagcaccagcagctgaaaaaacagattgcggaggcagaagaggaatggacactgctgctgtcggaactggaagaaatgaaataaataagagagacttgattaaaataacgcatttatgaacaagaagaattatgtagccgtagctacgttggcatttgctatgctgacaagctgcgctggacagaaggaagcgaaaagcacttctggcattgatttggcaaacatggatactaccgtgtctgccggtacggactttttccgttacgcatgtggaggatggaacgatgcacatccgctgactgccgaatattctcgttacggcacgtttgatgaactgtttgaaaacagccagaagcagttgcgtgaactgattgaaggactggctgcgcagaaaaataatcaggctggttctgccgcacagaaaatcggtgacttgtataacatggctatggacagcgtaaccttgaacaagcagggtgcagaaccggtgaaggctatgctcgacaagattgccggcatgaaagacaagagtgaaatcgtgccgatgatgactgaaatggctcatatcggtatcggtacctatttccacagctatgtatatgctgaccctaagaacagctcactcaacatcttccagatgggacagggtggtatcaacttgggtgaaaaggaatattatctggataccgacagcatcactcagaatattcgtgaacagtataaactttacatcggcaagttgttccagctggctggcttctctgaagcagatgcacagcagaaagtggctgatgtgatggaaatcgaaactgccattgctaaagtttcacgcagtgcaacagaacttcgtgacccggaagctaactaccacaaaatgtctttcgatgaactgaagaagaccattgccggaattgactgggatgcctatatgaaaggtttgggtattcaggctccggcagaactgaacgtagaacaggtagagccgattcaggaagtagctcgcctgatgaatacacttccgttgtctaaacatgtatcttatctggaatacaacctgctggatgcagcagcttcttgtctgagcgatgactttgtagctgcccgtttcgatttctatggcaaggtcttgtcaggacgccaggtaaatcagccgcgctggaaacgtgctgtaaactcagtgaacggcatgctgggtgagctggtaggcgagatgtatgtggaaaaatacttcccggctgctgccaaagaacgtatggtgaagttggtgaagaatctgcagactgccctgggtgaacgtattgatgcacaggaatggatgagcgacagcaccaagattagagcacacgaaaaattggctaccttccatgtaaaagtagggtatcctgacaagtggaaagactattctaaactggaaatcaagaacgattcttactgggctaacgtatgccgtgcttcagaatggggattcaatgatatgtacagccgcattggcaagccggttgacaaggatgaatggctgatgactccgcaaacagttaatgcttactataatccgtcaactaacgaaatctgtttcccggctgctattcttcagccaccgttcttcaatatggaagctgacgatgccgccaactatggtgccatcggtgtagtaatcggtcacgaaatgacgcatggattcgacgaccagggccgtcagttcgacaaagacggaaacctgaccgactggtgggctccgggtgatgccgaccgtttcaaggaacgcgcacaggtgatggtggatttcttcaacaagattgaagtattgccgggcttgcaggctaacggtgaactgacactgggcgaaaacctggccgaccacggaggtttgaacgtagcttatctggctttccagaatgcgactaaggatgctccgcttggtgtagtcgacggtttcactccggaacagcgtttcttcctggcttatgctactttgtgggctggtaacatccgcgacgaacagattcgtgtgtatactaagtcagatcctcactcattgggtaaatggcgtgtaaacggagcgttgcctcacattcaggcttggtacgatgccttccacatcacaccgtctgatccgttgtatgtagctcctgaaaaccgtgtgaacgtgtggtaaactacagacggtaattcacaatctctataaatgggggtatatgaactgttgcaaggttcatataccctcttttttgttcttaagatggagaatccacagggcatgtagtctgttcttctttttctcctgaaatattctttcaaatacccttatctattctctgtttcacacagtgggatttgtatcccacactgtgaaatatatatcccacactgtggtttttgtatttcacagtgtgaaacagagaatttgtcctgaagtttggaagaatgaataaggcaaatttgtggtttcgagggaggaattcacggtttccggtgatgtataccttaaatgaaaaacttttctttgtaaaagaaaatattcaaaaatgggaattatgagaaacaagttaagttttttattgtcagttgtttgtctgtggggagtaatcttagtttcaggatgtagtgaaaaggatgagactcccacaaatctgactttgaaagaaggtacacaaactactcaggtggtttatgccgatgaggtaacgaatcagggtggaatcagttttacagctttgtccgactggacagccacagtaacagaagttgcgacagaagctgcaaccaaggctgcttcgggaaaagtggaatggctggaattgagtgcctatagcggaggtcctggtgaatataccttgaccttgacattgatagagaacctgaccggaaaggaccggaaggctaccatcgaaattcgttgtggtaacgatgtgataaccattaccgtagagcagaaagctactacagaagcaggggaaactcctgccccgaaagaaaagcgtctggttcgttatgagattacaaattcaagcagcttgtatccggacagctatactaagtctattggggaactcacttataatgagaacggaaagctggcagccttgaaaaccattagttaccaaggcgatgcgcagggatatttcacagagagaatctatcagttcacctatcaggaaaaccagatgtggattgaccggaaaacactttccggatatgaatcggatgaatcgtatgtgattacattgaactcagagggttatgtatcacagttgtataagaaaaaggaatcttcttctgagcagcatacattgtggatgtttatttattccgacggttatcttcagcagatacaagaagattatgactattatccaggtgaccatgaagatggggatgaggaagatggaaatgtggcaatcgatccgggagtatcttctggcaggatgggacgtgcttcggataggtctattctgcaattgaactggcagaatggcaatctgatgtcgacggagggagaattttcggatgaaagctatatgagttatgcatatactgaatatccgaatgtaacgccttactttgattttaatgtagtggttcgttcgttgttcggcagtcatgcttatgaatatgatgacatggtgtctatgctttatatgttgcgtatgatgggtaaaggtagtaagaatctggtaacgaaagatgttgtggactggggatataatatgccggaaccgggagaaccggaagtgatacatgaagatacatgggctccttttgcatatagctttacggaagataattatctggatgtaattactggcaagtgtactttgtattcataccaggaggatgaacatggaaatcatgtttcagagtctacatcttattacaatgatgaataccgctttgtgtatgaataagtagggatattcagtaaatgtccctaaaaaataagatggcatataaagtcgatagagtataatcactttatatgccattattattgctctttttctgtgttttttcacataatcctatctgttggacatgacgtttcggaagaagtctgatgacctcttctgctcctgtctgtaaattcatgtcatgccgctttagctgttctgctcgtgaccttgtctatcatcagtacggcatttgccgtatgtattccgaagaaaatccacaggatttccgtcttcctgttccgtgcctttactctggagagcgagtaatgctgcttttgagtgccgaagcttccttcaagccgggtggccctttctttggagagttcacttctgagcaccttcctcaagggctcatcctttgtctcccttcccttgcgtacgaaggaagtggatatcccatatttcgtgcagaactttctgttggcattattggcatatatggaatcggcagccacgcatcttaccctcacattcatgagcttctgctgcatgcggatgcagtccttcaggcgtataccttcgttaaaagccttgaacgagaggtgttcgatgaacgatataccgtctatctgtatgttgttaacctttgcaccgaattcaacggattttgtttcctttcctcttactattggacgtacataatgacggtcaatgctgacgatacggtcactaactttcttcccttcaaacatttccttttcctgtacaagaatctttctgatgatggaaagccgctttcggtaatcctgtgtatagcggagtgaagtaccgtaccggcagtgaatcccgtctctttgactgattagtttttcaagaagcctgatcatacgacgcttgagcatccgtgttcttgaagccttcctttttcttttcttgcaataggaaagataggattccgccacatccttgtatttgttacgcggacgccttatgccaagttccccgcaatgcttgcagatatgcctgtagagccttcgagactttcccagagaagtttcatatccgtggggaaacgcatgtggctttcatagcacgtggcatcggtcatgcacacgtgaaggttctcaagataaggtttccagtgtgaggacagtacttcctggagggaatcaatgtcaagacgggatgccatctcattacggatagcactgattatcttgtagttggttatggggaaggacgggtctatcatgattccgcagaacatctgatagtgtatgttgccattcagatgctccaccagttgtctgtcggagaatccggtgtaggctttcaggaccataagagcaatctttgccgaaggacagaaaatattcctgcgtccaagacgctgttcacacaggcctatggcttttgccatacgttcaaacggaaacaccgagtgaagcctgccaagttcactctcattaaaactcttgcgatatttttcctgaacatcaaattctgtgaagcccaaagtagggtgaatttctgaaatattttgtatcttagccatatctttgttggaatatttcccccgttttggctgccaaaccttattttcgggggaatacctaaagatacaaaaaagccaactaattcgcaatactttgtgtatgaattagttggctaattttatactatttactgaatgtccctatttatacccaataaataggagtatgaaatcggttatttatgggaatatattttttaatattatcgtgtatttttgttaaaaataagttttgaagacagaataataggaaattaaggctatgaagaactgctaagtccttgtattcgtcaaggaatgttactcataatgcgaatggggtcggggacttatgcaagcgtgacttttgaagaatgtaacggggaataaaaagacttcattttgtcatcgcgctgaagaatccgtattgcaatatcggggaagttgcaatgcggattcttttttctgtatagtgacgtccgttatgccggaaaccagaaatgtattaccgttccttgtccttctttcgaggtgatgtcgcaaccgccttgcagcttatcacaacgttctttgacgcttcttagtcccagtcctgcttgaaggaaatcattggaaagcttatcggcggagaaacctttcccgtcgtcttcaacgataagattaacctgcccgtcctcatagctggcagtgatgtaagcctgttgggcattggcgtgtttcagcatgttcgatatgatttcctgaagaatgcggtacacttcctgagtttggtcggccggaaagtctatctgctgaatgctttcttctatgtagcactggatatgaggtgttttcagcgatttcagcttatccgtgtaaagtgtgagtacctggtacaggctaaagttgctgagggcaggagttgccagctgatgcgaaaggttgcgcagattttccctgatttgtttgagttgagtcgttatagctgagttgtctgactgcttcatttccatttctacggataacaaatcattgcatactccgtcgtgcagttccttggaaatacgattgtggctgtcttccagtccacagatgtatcgttcggtcattttcttgtgcatgtcggtaagcaagagttgtctttgcatctctttctccttgatttctttttccagtttcagttgcttcaggttgaatgcaatctttcgtttatgcatgcttatgacccgaataatgagcagcagcagggccaagataagtatgcccccgatggtgtaagtgcgtatcaggtaagcagctttttcctcggcacgttttccgttgagtccggcaatctgcaagtctttttccttcaggtccagttcagcctcaaatccggacagacggttctgatagtattggtcgtttagtttctcattggcctgatatgcctccagcatgagctgataagctaattgtccgttgtttctcctgccttctatttcggccagtgtaagcaggattttgggtaacaggccggaaggattctttcgggcaaagtcggctgctttcataacgtagttacgtgcctgaagcaaggagtccgtatcatggaataacatgtacccatataagtactctaaattcgcaatatttgccttattgtgtgtcgtacttttataactcatggctttctggtagtattgcaacgcctgccggggctttcctgcatccctcgatactctggcatattgcgtgtaggccaatagcttgaggccgtcgggcatttccggacgaagtttctggatggccagttttagcgtatccattgcctggacaggctgttggttgttagctaacaaaatggcatggttacacagtctgtttacttccccgatgcgatagtcgatggtaagtgtgtcggtttgtggataagtaaacattttacgagaaatctgtatggcttcattgttcttgcccgtttcattgtacagaatggaaatgttggatacgatgatggctgccaggttgtaattctgcaagtcttcagtaatggcgagcgccttctgataaagtgagatggcattgtcgagcatgaacaatctgcggtgtatgactcctgaaagattgtaggcctctgccaagttcacagaatcttttacctgttccagttgattaattgcttcttctgctgtttctcttgcagccggcaactggttgttctgccattgtccgtaggctatttcatacgtagcaattgccgcaatttcctggagctggtgtgctatggtgttttctggaaatttttccagtgccattgcgttgtcccggatttgggtcagtagcgtatttgccctctcactgtctcccttctggttgagaaatcgggcatagtccagggtaatattcagcgcatagagcttatcctgcttgtaatggtcttcgtgaataataagattgtacactgaatccatctgtgcatactcaccgttattgccgaatgaatgcagcaaatcagccagtttgttatttttttcattggcattcaggaacgcactcagactgagaaataggaaaaaaagaatctttttcattctgtaatccaaccttttaaaaaagcaattcgcataagatgtgatacgttggtagccccacttttcagtaagatgttctttctcatcgtatcaatagtatttttgctgagattaagtttgtgggcaatctcatcggaagtaaggccacatgacagcatctgaatgatttcgttttcacgcgggcttggtgtataagtaatggacttttccgtagaatggtcgcccatgatagacagtacgacattcagcgcagtaggcgaataatatttatttccctcgtgcaagatgttgtgtatggccttttctatttcttctattttatcatttttggtcacgatacctgctacttccgctttgatcagcagtttgataatccagaactccgtatgcatggtatagatgagttgaggaatattcacacctttcttttgcaggtaggttatgacatccaaggctgttttatcctgaatctcataatctataattagcaggtcaggagtatgatcgttcaggtaattatataattcagaataatgatgcccggtagttatttggtattgctggttgtttgccagcaattgtgcaatcccttcggtaatgatgggatgatcgtctaaaatatatatacttttcatgggaacgtacgtgtgttgtgtttttgctttttacaaagatggtaatttttctttcgctatgcaaatagaagaaaatttttgtctttatgtcaggcaaaaaaacgatttcaattacaattcagtaaaacttagaggtgtaaatggaaaggtgtaaaggtgatttttatgtttcccttgtgcgaaacctacgtttctcaaggccgagctgtacgtttcccgtatgggaaacgtatggttctgcttcgggaaacgtagaatgtggtagtcggtttgtgagtttatgtaggtggattttgttgtttttgtgtggggatgtgagtgggggaaaactgaaaaatataaaaacaaaaaagcatcgacaatcatcagattatcaatgctttttaccagtcggggtgactggattcgaaccagcgaccacacgccctccaggggtttattttatgatatatgtattttgtatttgtttgattttcagcatggtttttattgataatcaactatttaatttctataaattttcttctgttttgatggtttttgctcaaaatgttgtagatttgttgtaggaaaataaatataacacctatatctatggcaacatataagtttattctgtttgcgggtaatgaacgtaaagatggcagttttccggtttctattagaattactaaagaaagaaaaagtaagttaatacgaactggattggtttcaacaaaagagcagtggaatgaatctgatggtcgatttgtttctgataagaaaattgtacctaaatttaaaatatggaatgcaagattatctgaaatagaaacccagattaatgaaatatttcgcaactttgaaatagaaagggttgattggactttaaatcagtttgaagaagcatttttgaataaggcctcaaaaggtaaagtaaaggattatttcaataagacaataactacgttaaaggatactggtcatgtaggaaattcagtttgttatagtcgtactttacatatgcttgaattgtttgatagtaagtttgataagaaagtgttttctgaaatagacattaaatatgtaaaggctttcgatgtgtttcttcagaaacgagagtgtaaaggaaatacccggaaatattatttcaaagctctgcgtgcaattttaaataaggctatacaagatcaggaggcttctgaagtcacctatccttttggaaaaggaggttttaatatctctgccttggaagaagaaacagcaaagcgctatttgccacatgaagatatggataaactgaaacatactgctgttaaaagtcatgctcaagagcttgcaagacgtttgttcctattttcttattattgttatggaatatcgtttattgacgctgcactgttgactaaaaacaatataatccgttataatggtggaagctatattgtttataaacgaaataagacaaaagaagcaaagaaagtaaaacctattcagattaagataacttctgaaattcaggaattgatggactggtttgcttctaatacaattttggtagaagattatttattaccaatcgtttctattccaggatataaaggagaacaattatataatcatattcgtagccgttttggacgtaataacaagaatttggctaatttagcgcagactttagggattacggacatgaagctgaccagttatgtgagccgtcatacaatggctatgactttacaggacaatcaagtaccacgtgaagttatctcacagatattgggtcatagtgatttgtcaacgaccaatacttatttggatagctttgccagtagcgtaatagacgaagcggtaaaagtattataaaggaaacggtatgttatcaacaaataaaataaaagacttgcttttgcatggcgagaatagacaagtagaatttaagaaatgcacggataaggtttcggcttccgtgtatgaaacggtatgttcttttctgaatgcagagggaggatatatctttttaggagtggatgatgatggggctatattaggaattaaccctaaatgcgtaacagatatgaccaaaagtattatcaatacactgaataatcctgaactgtttcttcctccaatgccaatcacgccggagcagacagagattgacggtaagattatcctgtatctgagtgtgccggagagtgaacaggtacatagatataagaaccgtttttatgaccgttggggtgatgcagacaatgatgtgtcaaagcatacttatctggttaagaacatgttcatgcgaaaagaaaaggagtcttccgagaatgaagtatttcccgatgtaacattggcagatatggatgaagaatcgttcaagattatgcgtagccacatttctattcataactccaatcatccgtggttgagcatgacaaatgaagaattcctgaaaagcctgttctggggtaagcaacggggaacaaatagggaaggatataagttggctgccattcttttatttggcaaggaacagactattctgaactgttgtccgtggcatcgtacggatgccatttatcgtagcgtgtcttacgagcgtttcttgcatccgcttccgactgaccctgatattcgttacaatgaccgggatatgatatgcgtaaatttgattcagtcatatatccgtttgttgaatttcgtgcaacgcaacatgcctgataagtttcgtttggcggataatggaatagaccgtttggacttacgggtaatgatattcagagaaataatctcgaatacacttctgcatcgtgagtatatcagttcatatagcaataagttcctcatattccgtgaccgggttataacggagaattggacgaaacctttccaaacaggggatatagatataaatgactggcgtacccgtacaaagaatccgctaataacaaaggtattccgtgaaatgaaatgggctgaggagcttggatctggacagaaaaatattcggaaatatgctccgttatactttgaaaactctgagatagagattcgtagtggagaggagtttgtcttttctattacctatcgtgatcctaaagagtttgagtttgcaaaaaatattcagacaggtcaggaccaagttgggactaagttgggaccaagttgggaccaagttgggactaagttggcactaagtcaaggagaaatacgaacaattcttgaaacttgtatatcggaaaaatctctaatggaagttattactatactacattttagtaatcggactaaatttagaaacaaatatataaaacctttgatttcagaaggattgttggcaatgaccgttccgaataagcctaacagtcgtttgcagaagtattataccacagaaaaaggaaaatctctattactatgccaagacagaagcaattaacatttcatattcaagatttgaggtgtgcaggtcacatcgttgaagaattatccaaactaccacagttggataattttgacatgagttctattgaactgaccatcaaagaaaacaaacctgcacccaaaatcatcagaaaagatatagatatgctgatagaccgtttacagcgtggtttctctgccaacaaacatactgttatgcagttgaacggatattacctgattacaaatgttcatttagccaaatggatgaggacaactcaagcatcggtcaataaatggataaaggacggattaataaaacccagtaagaactctttcactaatcttaaatttttcgatatagacgaggtcgtagaccagcttcgcaaacaaaaacaataaaatcgcattttcttctatcatctataccaactgtgtcactaagtgccacttcaaagccatttagtgccaaaccttgaaatattaccgggtaaatgtcatcatatggcatcaaatgtccgcagttggcatagttaatatagatatttgcctgttttataagctcttatttttatatttcctttgccgtatcaacgttgagatagctgtgacgacagcttattgtttaacccctaaaatgtttgattatggcaaatattattgtcgcaacagaggaacaaattcaagaagctgtattcaatgcggtttcaaaattcttttcaggaaatcaacaggtagcacccagttctgatttacctgatacattgagtatgcccaatgctttgaaagtgttggaagataacggttttcctacttcaaaggcaaagttgtataaaatgacttcgcaggaacagattccctttatgaagtatgggaataaacttgtcttttcccgtaaggctcttattgaatgggcgcacaagcaattaatttcaaaccgtagcgaagattgtaattccgcaatcaacattcagaaatgtttcaaacgtaaacgctaaaatatatgagtacgaaagaaacattaaagaatgaaaatccgtttgtccgagtaggcacagcactttacaagatagttagccagccccgactgaacggaggacacgtcaagaaacgcattgtctggaacaacgagacgctccgccaagattacggcaaggactatctggctggtgttcccaagtatgacggtttctgcacagttcccgaccatgtgaactactgtcaggtaatagacaacttcctgaacctgtacgagccgataggacatgagccaaaagaaggagatttctcccacattcaagctttggtacgccacatcttcggtgaacagtacgagttgggtatggattacctacaactcctttatttgcagcctgtgcagaaacttcctattctattgttggtatcggaagagtgcaacaccggaaaaagtacgttcctgaattttctgaaagccgtgttccgcaataatgtgacctttaatactaacgaggatttccgcagccaattcaatgcagactgggcaggaaagctcgttatcgtggtggacgaggtattgctgaaccgcagggaggattctgagcgtttgaagaatctaagtaccacactttcctacaaagtggaagccaaaggcaaagaccgtgacgagattgctttcttcgccaagttcgtgctttgttccaataacgaaagcctgcccgtcatcattgacccgggcgagacacgttactgggtacggaaaattcatcgccttgaaagtgacgatacaaactttctgcaaaagctgacagcggaaataccggctttcctttattttctccagcaccgaaaactgactacccggcaggaaagccgtatgtggttttccccgaagctgacggaaactccagctttgctaaggattatccgatgtaatcgtggcaagtacgaagtagaggcgatggagctaataagggagataatggacaatgtagggattgacagtctttccttctgcttgaacgacctgcttaacctgctgaatctttcgggtattaaaatcgaaaagcaccacctgcgcagaatcgttacggaaagctggaaactgacacctgcccccaatggactgacctatacaacttaccagttcgactataatagggattgcaggtttgcacctatcaggagggttggacgcttttacaccatcagcaggtcattgctggacgaactctgattattttgttgaattgttgaaataagcaagtaatttattgatacttagtttaaaattttctcaacaaacactcaacactcaaaatgtgctgttgaaaagaaaaataatagtttcttttttcgcaggcatttgttgagccgttgttgagtggataccgctttgtctttcaacttgatacaagatattctcaacaattcaacgctttttactcacaatcaaatccgtatagaaaatgactatcgaagaagcaaaaaacataaggctggtagactatctacagagcttgggttatacccctgtcaggcaacagggagcaaacctttggtataaatcaccgtttcgggaggaaaccaaagcgtctttcaaggtgaatactgaaatcaataaatggtatgacttcgggttgggacagggtggcaatattatcgcactggtttcggaactttacagttccgtccacgtgccgtatctactgcaacggattgcggagcagacaccgcacattagacccgtgtccttttcttttcggaagcagtcctccacagagccaaattttcagcgtatggaagtaaggaaacttgattttcccgtcctgctttcttatctgcaaggcaggggaataaacttggaactggcgaaaagagaatgtaatgaggtacacttcgagaacaacggcaagcgttattttgccatcggttttcggaacatggctggcggttacgagatacgcaaccgatacttcaagggctgcatcgcgccgaaagacatcacccatatccggcatgaaggcagaaggaatgacacctgtttcgtgttcgagggatttatagactatctctcatttctgaccatacgggcggagaagtgttccaagatgccgtgtctggactggcagaactatatcatattgaactcggtttccaatctccacaaggcgattgacggattggcggtctatgagcgcatccattgttttttcgacaatgaccgtgccggaacggaagctttccaaagacttgcaaatgagtattcctaccgtgtccgtgacgcatcgcacacttacaaggactgtaaggacttgaacgagtatctcgtccggcaacgctctgtgcaggagcagaaaaccgaacagattgtaccacccaaaaggtcgaaagggcggagcctgtaacatcaatcatgtatcatcgctgtactggcggaagccgtattgtctgaaggagcaaggttatggaaatgtatacatttccgaccttgcttgccggaaggcaaagacagtccgctcccgttggtcgcagtccaaaacgaatttcagaatggaaaaagataagcaacaatcacggcagaccaggcgcaacaaggtgcgtgtggtcagcgcaagatttacagatattgagtaccaagcggtagagaaacgcaggaaagatgcaggtgtttcactcagtaggttcgttcactccgtattgcttacgggtaaagtagtacagcgcatcagcaaggcggatgcggacgtgttgcggaaacttgccggagaagccaacaacatcaaccagcttgcccataaagccaatgccggaggattcgcaggagtagcagccgaactgatgatgttgaagaaaaagatagtccaaatcataaaacagttgtccgatgattggaaaaataagtaagggagcaggattcagaggctgtgtcaattatgtattgggcaagcccgatgcaaaactgctggcggcagaaggagtgctgacagacagcattcagacaataacggattgttttcaatcccaaagaatgatgaaaccacatatccgccaacctgtgggacatatatcactcagctatgcacccgaagacgcttcaagaatgacagatgaaatactggtaagtctggcaaaggagtatatgcagaaaatgggaatcaaagagacccaatatatcattgcccggcataaagaccaaaagcatccacatgttcacattgttttcaatcgtgtagataacaatagacgcaccatcagtgacaagaacgactgttatcggaatgtcaaggtctgcaaggagttgaaggaaaagtatgggctttattttggtaaaggtaaagacagagtacggactcaccgcttgaaaggaaacgataagacgaaatatgagatttatcatgctgttaagtactcgttaagtaagtccaataattggaagctgttcatatcggaattatccagacagggaataaaaacggagtttaagtatagaggcaagagtaatgttattcaaggtttatctcttaccaaagatggcattacgttcaaggcttcgggcattgacaggaatttcagctattcaaaactggataaacagttgggagaaaacaataaccaataccaacagggtattggaatgacaaccaacaatgggcaacctgtaatacaacatgagaatacttatacctcaagcagcaatatagctgaaagccttgtcggagcattgggtggattattcacccctacttttaacaatgctgatgaaaatgcggaagctgcctttcaacggaagttgaaaaaaaagaaaaagaaaagaataaattggtaaaacccctaaaatagatacaaaaatgaaagaaatggaaaacaacaattttatccacacgctggatgcagtatataacctctgttccgaaatcaaagaattggtaaatgtagaaacggagaaacaagaagatgagggtagtgaaggaattatcttgctttcagacaacctacaacggcttcaatcggaaataacggaaatgaaaaccgaactatcttatgacaaagaaagacgggaaagacttcgtaccgctataaatttgcggttaaaagaactcaggtatattcagttctgagtacaaccaacggaaaaatatttgccgagcaagaacgaatcagcaatgaattgcaacgtttgcaaaatttgaaagttcagaacaatcatacgcatatcattgatttcaaaacctcccgcccgtttctgtggcaagcgagtatgattggaatgattatgcttcttttggtaagtaatgcttatcagtttaaaagaaatatggttttgtcagataacgacctaaagtatcgttttattcgaatgcatggcagagcgaatggagcagatttagatactttggaagtcatatttacgcacaataaggataaaaaacttattggtaacattcgcaacgtggtagaagattttgaataccgtacaagggtaagggctgaaaaacttgaacgagcaagattattgcaacaggaagcagaagccctgagataatatgtaatagttattgcccccaacaattcgtttgagttgttgggggaatcgtctctcaatcccaccatcctaacagtgatattctaaaaacctaaagaacaaacaatatgctttgcaaaagcgaacttcatattcactatcaatttcatacataccctgcgatttatgatatacacagaagcgatgtttgtttttcatattcacataagggattggagcatcagaattttcgtccatgataatatccaaaagccttgtagcaatccgcattcgactgatatcttgctccgcacgagctaaatgtccaaagttctcccaatagaaaatcatccactccaatttgaatttcaacagattcaagaaataatgataatcgtagtctggattctcattcataaacattgcccaaatctgtaaacggtcttgtcttatgcctttttgatatgctttccattctttttcggggagtcccttgtgaagtatgaaatggaatcgctttgaccaagtttcatcatcatccattgggttcacttccttctgatataacggatttcccctcatggattcttccatattctgcacttctttctttttgatttgtgcccaatcttgaaaataggattgagcatcagtatatttctttttcatttatatgtaagattactgtttatttgtataatgaactcattttattcaccgcctgaactatctcttcccgaaagaataaaggaacaagtacttccacatccgcccctcttgagagtaattcctgccggaagtctaaggtcggtttcatacggtactcaaagatggaataatcttctgttgtctcaatttcgcattgggaatggtgcaaaggcaaagcacggatatattgtacatgcattccatagactttaatccgaatggtttccaatttcttgttttcaatcataataccgaaatagtctgcaaagtaggcttctggatcaaaatcttttggataaataaacttcgtgtctaaggtggtcagttgttgtattctatccaaagaaaaggtgcggatattattccgctctttgcagaaaccgatgacataccatctctgcttaaacactttgatgcaataaggttgtaacgtataggtacttggttcttcgtaccaataactttgataatatagctccaattctaatccgtcacgcatggcttcaatgacaggcgtgaggtattttctgccggacggaatttcttcaaataggattctccgtttcaaatgatggctttcgtttatcagattattgactgcaaacgtattgagcaaccaattacggatacctcctttttgcatatcatctgcattttcgatatagtagtaatagccacctttccggttacaattgatatttatatcaaagacttgttcgatggcaatgcgccagttatgaaaggttcttaatggaatatcttccccttcactcaatcgtgaacgaagccaacgctcgttgatttcctcaaacgtgatttttccggctctgtagatagtgtctactaaccaaatgtatttgtcaaataaatcttttgtcatatcattccttttacaaaatcagctatttgaacatttttttaagatgttcttgaatcatttcttctgtttctccgtaataagtgatttcccaaagcaatccggctgtcagttcttgtaaagtgattgttacatcttcgtcaatatgaatatccatacctaaaagagcagaccaaggagagtagcttgccactgggtaataatcgctatcttcatcttttgggtcataaacagagcaattcatatcaatcatcggtgagcatccttcccatcttgacaccaaataaatggcatattgggattcagaaacatcatgcatctggagtttttgatatacgctacggtaagcctcccaattagcatgttgcacttgtttaggttggttctgctgatataaggctttaaattcaggtaagatgtcatcaaaactgaactgattaagtaaagatttgaatgtctgttgttccataatgcaaagttttaacttgataatgcaaatatcgcataaagttatgccatgttaaagcatacgctaaaaagattttattattctgagaaaaaagtattcctgtgtttccatttggcataaggcgaacttatttttgccacatcattaaacaaataaaacgattatggatttatatgcagaagatttggcggattacatctatcaagaaaataatgtggacaagaaacgtgctttgctgttggaagtggaagcggaaatcaaaaagctcatgggcgaacaggaaaaggggagccttgatttgaggcatatcggtgcagtacagatagaaaagatagaagatttagtaagtacacggagcctgattctcaaccggatgttccaagccacttcgcaggaaatcaaacgctttgaagcggttaatgaattgctgaatagtttgaccaagaagatgtaccaccgtatggcaaacctctatcgtacattgattgatagctcaaaagatgaatcttttgatgacgattatgtcattcgtggtacactaaggtatatgttctgtgggctggagtctatattggaattgccggaagacagctattatggttccgatttcgagtatatgatggagctgatttgctgctgtttgcttgaagagtgtaatgggggactttctgaaatcgaagaatgttcctgcaactattcaccccaaagcacttcagatatgacggatgaacagttgcattgtgtggatgtatgggatgatggtgtaacatgggcagaagggcatttacgccgtccggaattggagcatgttgtcgtgtgtcatgccgtacatgacatttgcacacacaaaccttactccattccggacttattgcggttaaatgacttttgggtggaagcccatctggtatgtcagcatattatagaccaaaacgggaaacgttataacccgaattgactatctgttctacaaagtatctgaaaggtggagacattgccaaactttgtactccacttttcctcgcattgtcctcctttagaatgtacatggccgaaaagatgatgctttggctggcgttttaagacggtttgttccaatatctcgctacccgtaccttcatccaatatgcctttcgggggaatgtgggtaatcaaaaaatccgttttatagggcagatcacattcccctcctaaccactgcatttgctgaatcatcctgctggaaatagcgtagaaagtgatgccatcatattctataccgcaatcttcaagtaatgttatatttgcaggaattaactgccgggcttcttccggacaaaggtcgaaaatgatttcatggttgccaggcacaaataagcgaagctgtgccggacaggaagaaaaccagtcaaagaaatcactcaacccgttttcttaaaagtccgatacaacatccccggcacaaattagaatatctgtgttttcggggatgcttaaatctcggtgcataccgtgcgtgtccgaaaatgcaaacaaatgttttcctttatagtccagtctcattcgtatttctcctgtctttggcgatgtcgctcccaataatcacgctcccattgaataatttcttccgtttctttccagtgcgaacaagtcatctcaatgaaacagggacaaaacacatctgcccaagtcacttgtgggaacatcatccatccttccttttctcttatctccacaggcatatcaagcgtttcactccaaggcataagattcataacaacatcttcaagatcttggtggacgtactttttttcacgggagctataaagccagtaataggtataaccgccttcgcaaacaatacggtcaatgcctgtgtagtggaaatcttctcgtgaactcatatcatcgaatgcggatttatactttctccatgaatgttctttccatattggatagccaccttcttttatctttgctttcatgtcactccaattcaagcaacgcatataataagagagtggcaagaatacgggatcaaacgaggcttccgcaatgagttcgcatttttgtcctttgttccgtttcagcaaatagtcaagaaagtccagttggtcaaagtttatgatattcttcatgcaaaccttggtcaatgctgagtattgtggattccaatctacgtgataaagctccgggttgtcagaacagtcaagttgggtaaggcgattatttctccggatattcaatatcttcaacttgttgccgcggcaaaccaggcgtcccagtcttggatttttggaaacattcaaacgtttcaatccttgattgacacaatacaagtcgataagtatcggacattgcgttacatccagcgctttcagtatatatgtctcacaggtataatgaaaggacgtgatggtatgtgtctcattgcttcttaggctgatgttccatttccctagcttggcatacgtgtgttctgcttggatttcttctcctttctcattatttatcgcttccacttgtccgtcaccccaatctatcgtaaattggcaatcgccataactggtgaacgagaatccgcaaacggatttctgccctttggcagcaaccgtcattcttatctcatccttttgctcgaacaatatctttttcaagcgacggaatgaacagcgagcagacagaatttcgtttttctcttcctctgaatcatgctcataaatctctctatcaacaattttgtgataacattcaaacgctttacgcaaatccttcttcgtgccaaggccctgctcatacattcgccctatgttataattgtcatttgcctgcttataataataaaatgctttttccatatcgggtgtggtgccttcgcctcgttcatacattccacccagtttgtacacatattctcctgccaaatagcattccaaggcttttttgtattccttacgttcataatagacatctccagcccaacaagcagacgagcctcctattttcatcccgatacccctcaacatatccaacgcttcttggttgccattcttagccaaatcagacagtaaacgaagtgcattcctcgcggaatactcgtttttcttttcacattctgcctcgtgatctaacaacaaccagaaccaatcggtatgcaacaattcatgctcgtctatctgtatgtcataatatggcttcctttgtgggcttcggtatttgctttcccaaatgcggaacaaatggtcagcagcatgacaacaacccttctttacccttgcttgaagtatgtccacaactttatctttcaccttttggggtacatgaggcgaatggagtagattttctataacacaaacatcaaaaaaagaatcatctccgccgctttctaatgcttctatatataaagacaatgcataattgaagtcacattttagggtaaagaacgatgactgcttgattacgtgtttgacggacgaacggctaactatcggagtataccattcggcaagttctactatcgccttagcatgtttttgctcgacagctttttcgtaccaatcaatcattttgctgaaatcagagaaatcagctttacataattctggtttccttgacaagtctgaccaaaatattgctttctcaaagttggagtaatttctgactactgcttccgcttcatgtaccattttatggtaaagcagttctcccatctcgtattgtgcatcagcattgcctcggcgggcaataggttccaacagttgggtagcttcatcatatcgtttgccccgctccaactcatccagttgctttcgcaaacgtttgctcaccactttgcttttcttttccatattctttcggttttagattacacataggaaaaacaaaacctcatctttccgtctgtttcaatgcaaagatgaggtcaagttatgccaaagtggttcacaggttattctttctccaatagttggtcgatattttctttgatatccttaagaatggcatcgtaaagtttccaatgaaatgtattagcttctttgggtgcatatccaggatgataagttttatatgcgaattttacaccctcaataggaagtttgatgacatcctcgcccgtaggcaaattgggtaacggatttggcttcccatttaacttaaagttctccaatatgtaattatagtatttgttgttttccattcccggtccaataaagaatatcaatatatccggtttaagaatttcaacttcatctggaatcacgtggaaaaagttcttctctattccgtgcgcttctacacttacagcaccaccaccttttgcagtacgggcagaaagcttggagatttcattccaaatcatagagacacgtttgccgggatatgcactgagtaaattatctttgatttctgccatcataccgttgattcctcttttgaagaattggctcccaccacgaaaatatcctccgttcccttctattgccacataattgtcatcaaggaagtcttcataggtagccattaaatcacccacatctaaatgttcttcagcattgtctcgttcccaaccatttggctctttaccaaagaacatgatttttatgtcggctttggtgtaccattcttcatgttcagaggtccctttttgagcataccatttatcataacctattagtgcttgttctttttctctttcttctttcttttgtcccgagcgcaacagagaaattaagaacggacattgcagtttgtctcgcaatccattggcttccaattgttccattaagccgttccacttactttcgtaaagttcggtcaattgttctgataatgtttccatacacgtatatttttaaagtggatgaattctaaaacaaatataacgaattctctcaagaaaactttcattttcaatgggaaatgctatatcttttgctgcaaagttctgtcaaggatatgcaacatcaaagcataagatgagaaaaaattgaagtaatgctttacattggcatcacttctattcatctttgcggaaaaaaggatgagaatatgggaaatagattttcgatagaagaactgacatgcctgcatttgttgcggtgtcactatgctgatatatgcagtaaagaggaacgagaattgcgagaaacaatcgcccttcatccggcaaccttcgtaaaagcaaagatgatttgtgagaaagaaaaagaagcggacatttgcattatcccttattatgcagacgattatccagtttcatttgctcaaattggcgtagaagcacctgcgttaattcatctattgggaaataaggagttactttataacgaaaattccattgccattattggctcacgaaacgctgatgatgtcggatgtgatatagcctatcagctggcaaaaagctatgcattgaaaggaaatgtcatagtgagcggattggcattgggatgtgacagttccgctcatcaaggatgcatagatgccaatggaaaaactattgcagtggttgcatccggcttaaatatcgtccatcccaaggcaaatgaatccttgcagaaagaaatcataaacaaaggcggtttaatcatctctgaacagccctttggcgtgaaagccaatcctgtacggctatatgcccgcaaccgactgcaagcagctttggtacaaaaagtcattgtagttcaatgtgctgtgaaaagcggtacgatgaatacggtttacttcgcacacaagtacggatgcaagatttatgccgtagcatacggtcaatacgataagcataatgctggaaatgagtacattctcaacaaaggaatcggatttcccatcaaattgtagaacttatgcaccaatatggcatattacaggatttattttgcaatcagaatctttaaaacagaatagtcatgacggtgaaagagttaatcatggaagtggaatttgatgacttgcttccttatttgaaagaaataatagtcgggcattttgacaacatctatgccttccgggaagcatatgatattcttcgtggtatggagcctaatcctaagtttgctgagaaagtttgcatagagcaaaaagaggattacagtctttagacgcagatttttgggagaatgaattggctaaagaacttgttttacccaagaatgcaactctaaacaaagaggaaattgctgcacattgtatatacgacatcaccttttatggtttttctccggtggaaagaattgagaatttttggaaaagtcatgctcccatgcaaagcaaaatggagcgaaggaaggctatcatacaagaacttactgtacccggaagtagctttatgtataaggatttagcttatctgatagaggtagaatacggcacacgatatgattatcactccattactaacgggcaagggaaccgattaggatatattactaattccatgactaaataccagcaacttgacctaaggcgatacaataatgcagtagtttgcattcgtgtttctgctcaatatccgttaatcaacgaagaactggaagagtttaagcgtaatgtccgctcatggctgaattatgaagacattcaatttggcattataacagaagatagtgattgtaaagaagcaacggttactttattattaaacaaacaagcataaataaagcatagcaaagggaagacttgcagttcattcgagtaaacagatgaaaataagaacaagccaaaacaaattattttcttctctattttatgtttgatagcatttagggtcaacgtaataatctgaggggtaaatccgataaatttatatctttgccggaaagaaaatcagcaaaagttatggaaacca

SEQ ID NO: 3777 - DNA, 1003 bp, Unknown
  gut microbiota DNA sequence
acggtatttcgccattgcttttccgaacatatcgggcagatatgaaatccgcaaccgatatttcaagggctgcatcgcaccgaaggaaatatcacatatcagacaatcgggagagccgagaaaagcatgttacgtttttgaggggttcatggactacctttcctttctgacactaaggcttgaaagctgtccgcaatcccccgatttcgacagacaggactacatggttttgaactccgttgccaatgtttccaaggcactctatccgctgggcagctatgaacgcatccactgtttttttgacaacgaccgtgcaggaatggaagccctgcagcaaatcagaaaggaatatgacaatgccagatatatacgtgacgcttcacacatatacagcggatgcaaggatttgaacgaatacctgcaaaaacagacagagacaaagaaacaggctcaatccatcaaagtgaagacaccgcccaataaaccgggaggctttcggttatagcccactataactacacgcttcgcttacgtagttgtgggctctcccgaggggattagggttttaccctaataacccactcagggcgtttctcccctgagaacccagagcaaagagtgaccctctctttgcaatctccgcttatgggttgccccctaagaaccccatgcgtttacggacagcagaaaagcaaacaataaagtacaaaccaaaaaacaagtatctatggcaacaaaatcaagcatacatatcaagccctgcaacatcgcatcgagcgaggctcacaataaaaggactgccgaatacatgcgccacatcggagagtccagaatctatgtcgttcctgaactctccaccgataacgaacagtggataaatcccgacttcggcagtccggatttgcggacgcattatgacaatatcgacagatggtaaaggaaaagaccggacgtgccatgcaggaaaaggaacgggaacgcaaaggcaagaacggcaagacag

SEQ ID NO: 3778 - DNA, 69228 bp, Unknown
  gut microbiota DNA sequence
ccattccgaacagagaagttaagcttcgtcacgccgatggtactgcgcaagtgggagagtaggtagtcgccgttttaacagaagccctgaggcagaaatgcttcagggttttttgtatccataacccagattttattgtatctttgcaactggttaaatctaattatattgtttttttaattatcgaataagtatgagaacacgcatcttacaccgttggaaaacggtttgtctagggggattattgggtatttcgtcattatgtgcacaagcagatggaacaggctatacgcccgctccagagaatctgcaagcccgaaaggaatttcaggatggcaagtttggcatctttctgcactggggaatttatagcatgtttgggcagggagaatggtatatgaataccgacaacattgattgccatgagtatgcaaaggctgcgtcaggattttatccttcacgttttaatgcgcaggagtgggtagctgcaatcaaggcttccggagccaaatatatctgtattacttcccgtcatcatgatggcttttctatgtttgatacgaaatattcagactatgacatcgtggatgccactccttttaaacgagatgtgataaaggagctggcggaagagtgccgcaagcagggaataagactgcatttatattattcacatctggactggacgcgtgaagattattatccgttgggaagaacggggcatggaaccggacgtacctcacatggagaatgggcaacttattatcagttcatgaatcatcagcttacggaattgctgactaactatggtccgattggtgctatctggtttgatggaatgtgggatcagcccgatggctttgactggaaattggaagaacagtataaactgattcacaaattacagcctgcatgtttgattggaaacaatcatcataaaacaccttacccaggtgaagactttcagatgtttgaacgtgaccttcccggtgagaataaagcaggactgtctggacagtctgtaagtgcgcttccgttggaaacttgtgaaacgatgaatggcatgtgggggtacaaaataaaagaccagaattataagtcggttaccgatttggttcgtctgctggtacgtgcggcaggtaaaggagctaatctgctgatgaatatcggccctcagcctaatggagaattgccgtctgtagctgttgaacgcttgaaaggagtgggagagtggatgtcgaaatatggggaaaccatttatggcactactgcaggaaatgtaatgagtgcttcgtgggggaccactacccgtaaggataatatgctttatgtacatctgttagcagatcgtatgcctcagttcgtgaccttgccggtgacggaaaaagttatttcttctactttgttcggtaccggtgaaaaagtaaaatgggagaaaattcaaggtggcatcgtattgcatacagaaaatttgaaaccttctgtagactgtattgtggccttaaaactgaaataatttgaatttaaaataagaaaaaaggattgtctgacactttaatagttgtgacaatcctttttcttgtttatatttaccacaagaaaaacgaaatatcatggtgataaaaacaattttggatacagatttatataagtttactacttcatacgcttatataaagttattcccttatgccattggaacctttacttttaaagatagggatgagactgaatatacggaaggatttctggaagccttgaaaaatgaaatccataatctggaaatggtgaaactgacatcggaagagcaggaatacatgacaacccattgtcgttttctgcccagtgtgtattgggagtggctttcttccttccggtttgacccgaataaaatagaagtatggttggatgagcaccatcacttacagatgacggtgaccgattacctgtataaggtaactctttatgaagtgccgctactggccattgtttctgaaataaaaaatcaatttctgaatcgcattccagacaagcaggcaatattggcaaaactggccgaaaaggtgaacctgtcgaatgcacaccaaatgcctttctccgagtttggtacacgccgacgtttctcttttgacgtgcagaagctggtggtggaatatctgaaggaacatgcacagtattgtaccggtacatccaactgtcaccttgccatgaaatatgatatgcgccctatgggtacccatcctcatgaatggtttatgtttcacggagctcagtttggttacaagcacgccaactatatggcattggagaactgggtaaacgtgtatgatggtgatttggggacagccctgtctgatacctatacatctgattcattcctcagcaatttcagccggaagcaggcaaagttgtttgacggtgtacgttgtgattccggcgatgaatacgaatttatagagcggttgatagcccggtacaaggagttaggcattgacccgactaccaaaacgattatcttcagtaatgcattagatttcgagaaggcactgaagatttatcagtattgccagggaaaaatccgctgttcctttggtatcggtaccaacttgacgaacgacacaggttatcagccatctaacattgtgatgaaattatcacgctgcaagatgagtcagagtcaggaatggcgtgaatgtgtcaagctttcggacgatatgggcaagcatatgggaagcatgacagaggtagaagcctgtctgcatgagctacgtttgcttacagaatgatagatttatagtctgttgcttttgtttgtgtgaatttgttgtttaaataatgaaaaaactttctttttattttcttatttcaaaatattgtatacctttgcagcatctaaaacgaaacgtataaaacgaacgattatgaacaacttgtttttacatattttgctatgcggtctgattaatctgctggaaagcccagtgggaagtgagtcgtgcgcatactgatagtaaaaatgaaatgatatcaagcctttctcacttccttgtgcgaaaggcttttttttgagataacaagaaataaaaagataatattatgagtgacagattatttatttttgatacgactcttcgcgatggggagcaggtaccgggatgccagttgaacacagtggaaaagattcaggtggcaaagcagctggaagcattaggtgtggatgtaattgaagccggttttccgatttcaagtccgggagattttaattctgtaattgaaatttctaaagcggtgacttggccgactatctgtgcgttgactcgtgctgtgcagaaagatattgatgtagcggcagaagccctgcaatatgccaaacataaacgtattcatacgggaatcggtacttctgattcgcatatcaagtataaattcaattctacccgtgaagaaattattgaacgtgcagtagctgccgtgaaatatgcaagacgttacgtagatgacgtggagttttacgcagaagatgccggacgtacggacaatgaatatctggcacgcgtagtagaagcagtaattaaggctggagctacagtagtgaacattccggataccacaggctattgtttgcctgatgaatatggtgcaaaaatcaaatacctgatggagcatgtcaacggaatagacaaagcaattatctctactcactgtcataacgatttgggcatggctacagccaataccatcagcggagtgttgaacggtgcccgacaggtggaagtaaccattaacggtattggtgaacgtgccggaaatacctcgttggaagaagtggccatgattttacgttgtcaccatgacattcagattgataccaatatcaatacacagaaaatctatcctaccagccgcatggtgtccagtttgatgaacatgccggtacagcctaacaaggctatcgtgggacgtaatgcctttgcgcattcttcgggtatccatcaggacggtgtgctgaaaaatgtgcagacttacgaaatcattgacccgaaggatgtgggtatcgatgataatgccattgtgctgactgcacgtagcggacgtgctgccttgaagcatcgtttgcatgtgctgggagtggaaatgactcaggaaaaactggataaggtatatgaggatttcttgaaactggctgacaagaaaaaggatatcacagacgatgacatcttggtattggcaggagccgaccgtaatgtgaaccaccatatcaaactggaatacctgcaagtgacaagtggtgtgggtgttcgttcggtagccagtcttggactgaatatcagcggagagcactttgaagcagctgctacaggtaatggaccggtggatgccgctatcaaggctgtgaaacagattatcaaacgccagatgactttgaaagagttcactattcaggccatcagcaagggtagtgacgatgtgggtaaagtacacatgcaggtggaatacgacggccagatgtattatggctttggcgcaaacaccgacatcattgccgcatcagtagaagcatatatcgattgtatcaataaattcagaaaataataaattaaacgagaaacgtatggctaatacattattcgacaaaatatgggatgcacacatcgtgcagaaggtggaagacggacctacccagttgtatatcgaccgtctgtactgtcatgaggtaaccagtccgcaggcttttgccgggatgcgtgcccgtggattgaagtgcttccgtccggaacgtatctattgtatgccggaccacaatacaccgactcatgaccaggacaaacctatcgaagatcctgtatctaaggcacaggtagatgcgctggcaaagaatgcagccgatttcggactgacgcatttcggaatgatgaacaagaaaaacggtattatccatgtggttggtccggaacgaggactgacactgccgggcatgacgattgtgtgtggtgactcacatacttctactcatggagcgatgggagcagtggcttttggtatcggtaccagtgaagtggaaatggtaatggcttcacagtgtatccttcaggcacgtcccaagaccatgcgtatcacgattgacggtaagctgggcaaaggtgttacggcaaaggacgttgcattgtacatgatgtcaaaaatgaccacaagcggtgcgaccggatattttgtggaatatgcaggtgaagctattcgcagtctgaccatggaaggacgtctcacattgtgcaacttgtcgattgaaatgggagcccgtggaggtatgattgctccggatgaagtgacctttgaatacatcaaaggacgtgaatatgctcctaagggtgaagaatgggataaggccctggcttactggaaaacattgaagagcgacgacgatgccgtatttgacaaggaagtacgttatgacgctgcagatattcagccgatgattacttacggaaccaatccgggaatgggcatggctgttacatcggatattcctaccacggaaggcatgagtgaagtagaaaaaggctctttcgaaaaatccatgcaatacatgggattccagccgggtgaaagtctgctgggtaaaaaagtagattatgtgttcttgggagcttgtaccaacggacgtattgaagacttccgtgcgtttgcttctatcgtgaagggaagaaagaaagctgataatatcactgcatggctggttccgggttcttggatggtagacgaacagattcgtcaggaaggacttgacaaagtgttggaggaagctggatttgaaatccgtcagccgggatgttctgcttgtctggccatgaacgacgacaagattcctgccggaaaatattcagtatctacaagtaatagaaactttgaaggacgccagggaccgggttcacgtaccttgctggcaagtccgttgactgcggctgccgctgccgtaaccggtgtgataacagatccaagaacgttaatgtaaaaaatgagtgtcatgaaacagaaattcaatatcataacaagtacttgtatccctttgccattggaaaatgtggatactgaccagattatcccggcacgcttcctgaaagcaactacacgcgatgaaaaattctttggagacaatttgtttcgcgactggcgttatcatccggatggttcgctgaacaaggattttgtgctgaacaatcctaaatacagcggacagattttagtggccggaaagaacttcggtagcggttccagccgtgaacacgctgcgtgggctattgccggatatggttttcgggtggtagtttcaagcttctttgccgatattcataagaacaatgaactgaataactttgttttgccggtggtggtaagcgaagagttcttgaaagagctgtttgcttcgattgaagcagaccctcagacggaagtagaggtgaacttaccggcacagactattaccaacaaagcaaccggaaagtctgaaacatttgaaatcaatgtttataagaagcattgtttgatgaacggactggatgacattgacttcttggtagagaacaaagataagatagaggcttttgaaaaggcacgcaactgaccgtaaaaaagagtgattatgaataatcatccgagaatagagataatggacactacgttacgcgacggagaacagaccagtggcgtatcgtttgtccctcacgagaagttgatgatagcccgtttgttgctggaggatttaaaggtagaccgaatcgaagttgcttcagcccgcgtgtcggatggtgaattcaatgcagtaaaaatgatttgtgactgggctgcacgcagaggtttactgcagcgggtagaagtcctgggattcgttgacggaaagatgtcggtcgactggattcatgatgcgggaggacaggtcatcaacttgctttcgaaaggctctgaaaagcattgccgctatcagttgaagaagactttggaggaacatctggctgacatacggaatacggtagactatgcgcacgaaagagggcttgaagtcaatttgtatctggaagactggagtaatggtattaaggattcaccggactatgtattcggattggtagatggtttgcgcgacatcggtatccgtcgtttcatgcttcctgataccttgggaattctcaatcccttgcaggtcatcgaattcatgcgtaaaatgaaaaagcgttatccagaccttcattttgattttcatgcgcacaatgactatgatttggctgtaagtaacgtattagcagctgtattgagtggggtgaaaggattgcatactaccattaacgggttgggagaacgggccggtaatgcccctctggccagtgtgcaggctatcttgaaagaccattttcatgccattacgcgcatcgatgaaagtcgcttgaatgatgtgagtcgtgtagtggaatcttattccggtgtgacgattccggccaacaagcccattgtgggagagagtgtgtttacacaggtggctggcgtacatgccgatggagacaataagaataaactctacttcaacgacctgcttccggagcgtttcggacgtgtgcgtgaatatgccttaggaaaaaattccgggaaagccaacatccgtaagaatctggagagtatgggcctggaactggatgaagaatccatgcgcaaagtcaccgaacgaatcattgaactgggcgatcgtaaagaactggtcactcccgaggatttgccgtatatcatcagtgacgtgttgaagcacgatggcatacagaataaggtgaaattgcttagttactttgtaaccctcgccaaaggattgaagccgatggccacgcttagcattgagattaacgggaaaacctatcaggaaagttccagcggcgacggacagtacgatgcttttgtacgtgcgttgcgcaagatatataaaggtacattaggaagaaaattcccgatgttactgaactatgctgtgactattcctcctggcggacgtacggatgcctttgtgcagactgttatcacctggaattatgaggataaggagttccgtacaagaggatttgatgccgaccagacagaagcagccatcaaggcgacaattaaaatgttgaacatgatagaagatttaaattaaaagcatacaattatggattttaaaatagcagtattagccggtgacggaatcggaccggaaatctccgttcagggagtagatgtaatgacagccgtttgtgagaagtttggtcacaaggtggattataaatatgcactttgtggagcacatgctatcgatgaagtaggtgatccgttccctgaagaaacttatcagatttgtaaggatgccgatgctgtgttgttctcagcagtaggtgacccgaaatttgacaatgacccgaccgcaaaggtacgtccggaacagggattgctggctatgcgtaaaaaactgggactttttgccaatattcgtccggtacagaccttcaagtgtctggtgcacaaatctccgttgaaagccgaactggtagacggtgcagattttctctgtatccgcgaactgacaggcggtatgtatttcggagaaaaataccaggataatgacaaggcatacgatacaaacatgtatactcgtccggaaattgaacgaatcttgaaggttggctttgaatatgcgatgaaacgtcgtaaacacctgactgtggtagataaagctaatgtattggcttcttctcgtttgtggcgtcagattgcacaggagatggctcctcagtatccggaagtgacaactgactacatgtttgtggataatgcagccatgaagatgattcaggaacccaagttctttgatgtaatggttacagaaaatacgttcggcgatattttgacagacgaaggttcagtaatcagcggctcaatgggcttgttgccttcggcttctacaggcgagagcacaccggtgtttgaaccgattcacggttcatggccacaggcaaagggactgaatattgccaatccgttggcacagattctttccgtagccatgttgtttgaatatttcgattgtaaggaggaaggtgcacttatccgtcgtgtagtagatgcttctttggatgccaatgtacgcactccggaaattcaggtagaaggcggagcaaaatatggaaccaaagaagttggtgcttggattgtagactatattaagaaggcgtaaaacgaaatatcttattaaatagaagaaagggaggtcgcttcatggcagacctccctttttatgtttaaaacttcttgactcggatgtggcagtaaggttctcctcctgtcttgtcataatagtgctggtgataatcttcagccggccagaattcggatgccggagtaaggcgggtatttacctcgtagcctttttctcttagcagctggatgattgcttcagcttctgctttctgcgcttcgttcaggtagaaaatctcacttcggtactgcggacctatgtcaggaccttgtccgtctgtctgtgccgggtcgtgtatctcgaagaaaagtttgcataattccttgtaagtggtctgctccgcatcgtattccactaatacagcttcggcatgccctgtagtgtgtgcttttacttcctgataagttgggtgttgttcttttcctcccgtatatcctactgtgctgcgaataactctcttggctctctccatctgatgttgtaccccccagaagcatccgcaggcaaaaatggctttttctattttcatgataattgtctgtttaatgattgttcaaacttacaaaaaaatattgtaatccctcctgagttagaggaagaaatactaccttcgtcacaaattcaaacgaaagaagaaatgaaatacattgtgtggattctttgtgtatgggtactcagccttcctttgcaggcccagtcatataacgatgtggtagagcaggcaatggactgtgtgaaaaaggacagtcttgtgcaggcggaacgtcttttcaggcaagcactgaaaatggaaccggataatgcccggaatgccctgctgttttcgaatttaggtacggtgcagaagcgcatgggaaagacggatgaggccattgaatcctatacgttagcactgaatatcataccctattctaccaccatgttattgaaccgggctgctctctatctggaaaaagatttgatgcaaaaggcttatctggattattgtaatgtgatagaccttttacccaaaaatctggaagcccgtctttttcgtgcctatatttacatgcaacgtcgcgaatataaagaagcacgtgtggactacaatgtagtgctggagcaggatgtgaaaaacaagacagcacgtatcgggattatcatgctggatgagaaggaaggacggcatcagtcggcgatggacgctatgaacctgctggtttcagattaccctcgtgatgtatccatacttcggatgcgggccaatatggagtgggaacacggacaggcagaggctgctttgttcgatttagatgaagtcttgaaacttgacccgcgggatgcttcttgctatgtgatgaagggagatatttgtttgcagcagaaaaaaaaggcagaagcacgagaggcgtacgaaaaagcgttggagttgggagtttctcgggctgaattggctgaaaaactgaaacaatgtaaatagtattcaataaaaactttcgtttttgtttgtactttttaaaaagtttttgctatctttgcctgaaataggtgaagtgtgatgcaaattcgttcggttataaaattgggagtagtgctttccgtggtacttttttgtatcgggattgctttttatggttttgcccgtttgagtatggccgacaaggaaaaccgtgtggatatttttgaatttgttcctaaagactgtgcgggcattcttgaaacggataacattgataattttatgcatgtcttttcgcaggctgcatattcttcccagttggacacgcttcatcgtgcgggcttaatgaatgacatcttgagtgatttgagccgttattcttctgcagcagcccatgggctttcctatcaaatgaatcatgtagtaattagttttcatcgtcctcatactgccatggatgtggtggcttatttccgcataggaaaagaagggaaacaccagcttattgaggcggtaaaagggaagcatggtgctgatttcgtacccaagaaagaaacttatcgcggtaagaaaatagaaatttatccgctcagttctacgcgatatctgtcagtgtacactacagacggactggtagtggtcagctatcagaaaaaactgatagagcaggtgattgatgcggtgaaggataataattcgcttcgtgaagattctgtttttacttctattcatcatactcagccggcaagctttattacgatttatgggcgtacaccttccgttccattcttaggaaaagaatcctgtcatagctggagtgaatatgacattcatttgaacagcgaagtattctatctgagcgggctgatgaaagaagagcaggctgattgtctagaccgtatgttgcaggctgtccatacagttcctgtagtttctgagtcggacagtttgcttgtagtatcggggcgtgaacgggtagactcttgtatttccaaggtaatcgcctctccttctcataccttgtttgacgagtgtgtgtcaaatttatcgcgtgacgcttcctatattatggtggctgatatggaaaaagtggcagctgccccagagcagtttgcttcatatcttcctccattctttattcgtcatgccgatttattccgctcttttattctttctatacagtttacggaagtaaacaatcgcttgtcgcatatctttgtgtttacgtataaagagtaatcggatttatcttaatcggttcttttcaaaatgaggccctgccttaaggtggaaataaagtagtgatactactgtcagtgaggctccgaacaagtaggctatcttgaaggtagctatttctgccaaatatcctccagtaagcatacctatacccaaaccaacatcccatgaggtcaggtaggtgctggtggctgtgccacgctggctgttaggggctaagttcacaaagagagtattgtaagccggaaacatggtaccaaatcctattcctaacagcaatgaaatcagaaagaaaattcccgtagtcagttctaaattccacttgaccagccatccgcatgcggtcagggcgaagtaacacccactcaccagatacaatcctgccgcaattactttggtgactaatcctttgtcgacaagccggccactgaacagtcggctcaccgccatgccgacagccatcagcgtaaagaagaatccggtttctgcggtaatacctatttcttgcgcatacatggccacgtagttggtagtcattccataaggaatggagagtagcaggagggtgaatccggcaggaagtcctttcagcagaatgaagcggtcgagcgatataggagcacgcttcactggagccttataaggtgtgcggacggtccaagctgctataaatccgattacacatgaaccgagcgcatacgagaaaatagtcgtataagaagcacctccactgtgcaggaacagaccgaacatgggaccgatagacatggcaatgttattggtcagtccgtagtaacccaatccttctccccgtcgggaagacggcatgatgtcgataaccagcgtgtttcctcctaccgtaaccataccgaacgaaaatccgtgcacaatgcggaagataataaataaggtcagcgctgttgcagtcatatagccggcaaaaatcagtgtgaaaatgaaataagccagcaggtataatggtttccgggcaaatgtatccagaatatacccggagaagggacggatacataaagaggaaatcgtatagcaggaaagaatgactccaatagcggtatgtgaagtgtggaatacttccgacaagtaaaacggaaggatgggagtaaggagccaaaatccgaaataaagcaggaagttggcagccagaatggcacagaaactcggggtgacaagtctttctttttccatatttcgccgagagaaaaaggggagatggctgggtttgaatagataaacacggattacactaaggaagtcgatacctccggtgtaatccgtgttcttatgatgatgttacgataaatcagttagctgattcaaattcttcaaggaagcgtgtgtcattttcagagaacatacgcaagtctttaactttgtatttcaggttggtgatacgttctactcccataccgaatgcataaccggtgtagactttactgtcgataccatttgcttccagtacagccgggtctaccataccgcatcccaaaatttctacccatccggtatatttacagaacggacagccttcaccaccacagatgtcacagctgatatccatttcagcactgggttctgtgaacgggaagtaagacggacgaagacggattttagtttccggaccgaacatttcttgtgcaaactgcagcaacacctgttttaagtctgtaaatgaaacgttcttgtcgatatacagaccctctacctgatggaagaaacagtgtgcacggtagctgatagcttcattacgatatacacgtcccggacagattacacggataggaggctgtgatacttccatcacacggctctgtacagaagaggtgtgtgtacgaagaataatgtcagggtgactttcaatgaagaatgtatcctgcatgtcgcgtgcaggatggtcttctgcaaagttcatggaagagaatacatgccagtcatcttctacttccggaccgtcggcaatagtaaagcccatacggctgaaaatgtcgatgatttcattgcggacaattgtcaacggatgacgtgttccaagattaaccgggtaagctgtacgggtcaggtcaagttcggcagctccgttgtcctggttatcgaatgcttcttttaaggttgcaatccgttcctgtgcaaggttcttcaactcatttaatttcatacctacttcttttttctgttcagcaggtacattacggaagtcagccatcagtgcattgatggcaccttttttgctcaggtatttgattcgtaacgcttccagttcttctggattctgcgctgtgagtccttttacttcctgaagcaactgttctatttttgctaacatatctcttctttaattattttgtttgcaaaggtaaggatttaaactgaaaaattcagtttttcatccaacaaaaaagaaaactcttgtttcatgaaacaatgatacgaaaaaaaaggtatttttgcggcgatatttgaggagaccagatgaagagactaatcattgggtgctgtctgctggtgctgatggcatcttgcggaggaggacagaagaaagtcgatccttttgccgcgttgacagaacaaattgattccatgaaagttctgcctgattcgattcaggataccactgtggtggaagaacagatacctgcttcggctgacgagagttttgccgactttttctacaatttcgcttcggatgcaaagttccagcggtcgcgcgtggtatttcctttctcattgtacaaaggcaaacaggtgaagcgtattcaaaaaaaggactggaagcatgatcctttatttagtcgcgaacaggcgtacacggtgcttttcgataaggaagaggacatggaaatggaaaaggacaccagtatacatagcgtacaggtggactggatttttctgacagagaaaaaaatcaagcgttattattttgaacggaaaaaagattcctggttcctcgaagccattaatgtagaaaaaatggcagaagaacacgatggaaaagaggatttctataccttctatgaacgtttttcgcgcgactcacttttccagcaggaacgtctgcatgaacctctgtattttgtaacggctgaccccgaagatgaatttcagatattggaaaccacactggagcccggacaatggtttgcttttcgtcctccgatgataaagggtaaaatgaccaatgtacactacggccagcctgaaaatatacattctgattataaggtagtagaattcaaaggctttggaaacggctttagtaatacactctattttgaacggcgtgaaaacatctggcaacttatccggtttgaagatttgagcgattgatgcattatgaaagattatacaaattactcattgcttccttataatacattcggaatggatgtaaaggcagctcgtttcgtagaatatgaatcagtgaatgaactgctctgttttttgaaagagtggaaagcacaaaagactcctcttttacatgtaggaagaggaagtaatctgttgtttgtgtccgattatcaaggaaccgttttgcattcaggtattaaaggaatgcaggtggtgagtgaaactgacgagtgggtagagatacgcgtcggtgccggtgaagtgtgggatgattttgtggactacactgtcaagcagggatggtatggtgccgaaaatctgtctttgatacctggagaggtaggagcttcggcagtacagaatatcggtgcctatggagtagaagccaaggatttgattgtgtcggtcgaaacggtagcggtgaatgatggaaccactcgtcttttcaagcaagatgagtgtggatatgcgtaccgtgaaagtgtatttaaacgggagctgaaagggctttacattgtgacttatgtcacttatcgcctgaaaaaacagccagagtttcatttggattatggaaatatccggtccgaactggagaaagagggaggagaattgtctctggaaaaacttcgtcgtgtgattatacgtatccgtgaggcgaaacttcccgatccggaaaagattggaaatgccggcagtttctttatgaatcccattgtaccgcttgcacaattcgaagatttgctcaaggaatatcccgatatgcctttttataaagtaggtgacgaccgtgtaaaaattcctgcaggatggatgattgaccgttgcggatggaagggtaaacggttgggaaatgtcggagtgcatgacaagcaggcattggtgctggtgaatttgggaggagctaccggaagtgaagtggtcaagctggcagaagaagtggttcgttctgtgaaagaaaaatttggagtagccatttatccggaagtgaactttattggagtaaaacaatgaaaataacaattttaggaagcggaacgtctacgggagtgcctcaggtgggatgtacttgtaaagtatgtacaagttccgacccgcgtgacaaccgtttacgttgttccggtctggtagaagtaaacggagtacgtattcttatcgactgcggtccggattttcgcgagcagatgcttcggctgaatgattttcgtgcgatagacggagtactgattacccatgaacattatgaccatgtgggtggtctggacgatttgcgacctttctgtcagtttcgtgacattccggtgtatgcggaagattatactgccactcgtttgaagaaccgcatgccttattgctttacggaaaacctttatcccggtgtacctcatattccattgaattatattaaagaaggtgaaccgttcgtcgtttctaatgtagccggaaatcaggtggaagtaattcctttccgcgtgatgcatggaaagcttccaattatgggcttccgtatcggaagtatggcttggattacagatatgctgcatcttcctgaaagttcatacgagtacctgaaaggattggattgtctggtaatgaatgccctgcgtattgaataccattggacgcaccagtctttgtccgcagcattggagcagacagcccgtattgccgctggaaaaacctactttattcacatgagccatcagataggtttgcatgcggaagtgcaggaacagttgccggaaaatgtgttcttgacatacgatggacttgtgatagaatgggatgaggcaggggagaagaaataactcataagataaattaatacacctatcatgcttttttattgataaatctgtatctttgtgccctattaagtagacatttaagtagaaaaaatcaaaataataggaaaaatggcacaagaagacgttttcaagaaacttgtttcacattgtaaagaatatggttttgtattcccgtcaagtgatatttacgatgggctgggagccgtatatgattacggtcagaacggtgtggaactgaaaaacaatatcaaacaatactggtggcagagcatggtgctgttgcacgacaacatcgtaggtattgactctgctatcttcatgcaccctactatctggaaggcttctggtcacgtagatgctttcaatgaccctttgattgacaaccgtgattcaaagaagcgctaccgtgccgatgtcttgattgaagatcagattgctaaatacgacgagaaaatcaataaggaagtagcgaaggctgccaagaaatatggagaagcattcaatgaagaagagttccgtagcaccaatgcacgtgtgctggaacatcaggcaaaacgtgatgcattgcatgaacgttattcaaaggctatgaatgccaacgacctggccgaacttcgtcagattattctggatgaagaaatcgtatgtccgatttctggaacaaagaactggacagaagttcgtcagttcaacttgatgtttaccactgaaatgggatctactgcagacggtgccatgaaggtatacctgcgtccggaaactgctcagggtattttcgtgaactacctgaacgtacagaaaacaggacgtatgaagattccgttcggtattgcacagattggtaaggctttccgtaatgaaattgtagctcgtcagttcatcttccgtatgcgtgagtttgaacagatggaaatgcagttcttcgtaaaaccgggaacagaacttgactggttcaaaaaatggaaagaaatccgtttgaaatggcataaggcgctgggcttcggtgacgatcactatcgttatcatgaccatgaaaaactggctcactatgccaatgctgctacggatattgaattcctgatgccgttcggattcaaggaagtagaaggtatccactcacgtactaacttcgatttgagccagcacgaaaaattctcaggaaagagcatcaagtactttgatccggaaatcaatgaaagctacactccgtatgtcatcgaaacttctatcggtgtagaccgtatgttcctgagcgtgatgagtgcggcttatcatgaagaaaaactggaaaatggtgaaactcgtgtggtattgaaattgcctgcagctttggcgccggtgaaactggctgtcatgccgttggtaaagaaagacggtctgcctgaaaaggctcgtgaaatcgtgaacgacctgaaattccacttcaactgccagtacgatgaaaaagattctatcggaaagcgttaccgtcgtcaggatgctatcggtactccgtactgtatcaccatcgaccatcagacattggaagacaactgcgtaactttgcgtaaccgtgacaccatggaacaggaacgtgtagctattgcagatttgaataatatcattgcagacaaggtaagcatcaccagcttgctgaaaacattgcagtaataaattaaactacatgaacaagaacctattttggctgattgccctgctatttactctttctttcggctttatgtcgtgtgcagaagacactactgtggaagatccgtatgcgaattgggatgaccgtaatgtgcgatatttggactccattgcggatgtggcccgtgcaaacgaaattcccgaacttaatgaagttggaaaatgggttataaagcgtaattataaaatttcgaatggaagttcactgaatctagggttaggaggaagttcggtgggttcgaatccatttgagactcctcccagtgtgaacgattctgtatacatgaaagttctggaagtgggagaaggaagtaatcgaatttctcctttatatacagatacggtaagtgtgtactatcggggaaagctgattaacggaactgtgttcgatcagaattatacaggagatttgaatacggaggtacacgtacctactcattttgcattgcaggccaaacagtcaagtggtgtattcggtgacggattgattgttggttggattactgcattgcaatatatgaaagaaggtgaccgggtggaattgtatattccggcggcccttggatatggtacgcaaggtcagtcatctattccggccaattctgtattgatatttgatttgaagctggaaaaagtgattcatcctgatggcttggaaagctatagcttgaaagttgactgattataaataataagtacagattggaaagacggtgaggaagtggtttagatacacttcttcaccgctttttttatgatataagttgctcttgccagtacttccttggaagtactggagtactgcttagggagtactgaagtattttcggggaagtactgcagtactggcttggaagtactgagactttgacttttcctgatgcgactcttttgtttattaggagatttcttcgtatttttgtgcccgacagaaaaagaatgaagcagattttaggtacatattgtttgctgttggttagcctgtgggtgttggtggtgggtgtgtttccacaccatcatcacaatgaggcgttttgtgtcagtccggatatggagacttgcgcctcgtcatcgcatgacggatgcgaaggacgacaccattgtgcaggagatgccgacaagcatgcgtgcgacatcagttgtgtcacccacctgtctttttctgttcctcatcatttgccggattttacaccggactatacattctatacgttgatttatctgtcatccctttgtttggaagctccatctgtttcctttgaacgaggggatatgatttcctattacgtagaaaaactgcacgcacggcatttttctgccgttcgcaatttccgtgcacctccttttgctgttgtagcttgatttttagggaagttactgcactttgcaacctgcttgcaacgtgtagaatttatttttgcaaacaaaaaacaacagtattcaatgaaaaactatattttgacaggaacattgtgtatgttcctttttgggggatgcggagaacacgcacacgaccatgagcatgaaggtcatgaccatgaagcggaaatacatgcagaagaaaaaacagctcattcagatgaaatcgtactgacgccggagaaagcagaagcggctggggtggaagctgaagtggttcacccgggagcctttcgggaagtgatacaggctggcggacagattctgtcggcacaaggccaggaggaaacggtggtagcggcttcctcgggagtggtgtctttctcccgcaaaattgcggaaggaattgaagtgggcaagggcagtgaactgctgagtgtatctgccgagcacattcaggagggtgaccccgtgagaaaggcaaaggtggcctatgaaaaagccaaggaagaatacgaacgtgcagagaaactggtaggcagccagattgtgtcgcaaaaagaatttgcggctttgcgtgaggcataccagaatgcccgtctggcatacgaggctttgctgcccagcaagtcgggtaaaggagtagccgtgaaggcacctatcggcgggttcgtgaagaattgtctggtgaaggaaggcgattacgtaacgataggacagccgttgatgacggtgactcagatgcgccgcttggtgctgaaggccgatgtgtcggaacgttattatgcacaacttcctcgcattgtgtcggctaacttcaagacaccttataataataaagtctacagcctggagaacttgggcggaaaagtgctttcgtttggaaaatcatcaggcgatacgtcttattatgtaccggtaacattcgaatttgacaaccgtggtgacatggttccaggtgcatttgtggaagtcttcctgctgtcgggtgaacgtcagggagtcatcagcctgccggaatcggcgctgaccgaagagcaggggctttattttgtgtacctgaaactcgacgacgagtgttataagaaacaagaggtacaattaggaacttccaacggagaacgggtagaaattctttccggtctgaaagacggagataccgtggtgacccgtggtgccattcatgtgaaactggcggccgcttccaatgccattccggctcattcacacaaccattaaaagtgacccgctatgctgaataaaattatacaattttcgctacagaaccgcttgctggttctggtggcttcggtgttgttgctgataggaggaacctatactgctttccataccgaagtggacgtgttccctgacttgaatgcgcctaccgtagtggtgatgaccgaagccaacgggatggctgccgaagaggtagaacagctggttactttcccgatagagactgccgtaaacggggctactcatgtacgcagggtacgttcttcctctaccacgggattttctgtcgtatgggtggaatttgagtgggataccgacatctacctggcacgccagattgtgtcggaaaaattagcggcggcgggcgaggacttgcccgacaatgtgggtaaaccgacattgggtcctcagtcgtctatcttaggagagctattgattgtgggactgacttccgactctacttccatgcaggatttgcgtaccatggccgactggaccatccgtccgcgtctgttgtctaccggaggtgtggctcaggtagctgtactgggaggcgacatcaaggaatatcagattctggttcatccggatcgtatgcgccactacggcgtgacgttgggcgaagtgatggaagtgtcacgaggcatgaaccagaacaccaacggaggtgtcatttatgaatacggaaatgaatacatcgtgcgtggagtcatctctaccgacgatgtgcgtaagttgggacgtgctgtcatcaagactactccggacggggcacccattaccttggaggatgtggccgatgtacgtatcgggtcacagcaacccaagttgggactggcttctgaaaaaggaaagccggcggtactcattacggtgaccaagcaaccgaataccggaaccattgagctgaccgaaaaactggaagccgctttggccgatttgcagaagaacttgccgaaggatgtacacatttctaccgacattttccgtcagtcacgttttattgagagctctatcagcaacgtgcaggattcactttacgaaggggccattttcgtggtgattgtgctgttcctgttcctggccaacacacgtactacgattatttcactgataacccttcccttgtcgcttgtggtagccatcctgaccttgcattacctgggactcagtatcaataccatgagtctgggtggtatggccatagccatcggttcgctggtggacgatgccattgtggacgtggaaaatgtatggaagcatctgcgtgaaaaccgtcagttgccgttagcggaacggaaaccggtacgggaagttgtctttcaggcttcacgtgaggtacgtatgcctattctgaactctacgttgattatcattgtcagctttattcctcttttctttctgagcggaatggaaggacgtatgctggtgccgctgggtatttcttttatcgtgtctttgtttgcttctacgatagtagctttgaccctgactccggtactttgcagctacttgttgggtaaaaatacgttcaagggagagggattgcccaaggaagccttccttgctgtatggctgaagaaatattatgagcgtgccttgctctgggcgctggaacataagaagacggtattgggaggaacgatagctttctttatcgtggcgttaggaattttctttaccttgggacacagcttccttccttctttcaatgaaggttccttcaccatcaatgtcagttcattgccgggtatttcactggaagaatccgacaagataggccgtcaggcagaggaactgctgctttcgattcctgaaattcagaccgtagcccgtaagactggacgtgcggaactggatgaacatgcgctgggagtgaatgtatccgaaatagaagcaccttttgaactgaaagaccgctcgcatgccgaattattggatgaagtgcgtcacaaactgtcggtcattacgggtgccaacattgaaatcgggcagcccatcagccatcgtattgatgccatgttgagcggtacacaggcaagcattgccatcaagctgttcggcgacgacctgaaccggatgtttgccatcggtaaccagataaaggaggcggtgagtgatgtagaaggaattgccgacctgaatgtggagcagcagattgagcgtccggaactgaagattgtgccgaagcgtgaaatgttggctaagtacggtatctcgttgccgcagttcagtgagtttgtcacggttaatatggccggtgaggtcgtgtcgcaggtatatgaacagggaaagacctttaacctggtggtacgtgccgcagaatctgaccgtggtacgatggaacgtgtcaaggaactgatgattgacgatgcacaaggccggaagattcctctttcctatgtggcagatgtgacttcttctatgggtcccaataccatcaaccgtgagaacgtaaaacgaaaaatcgtaatctcagccaataccagcgggcgtgacctgcgcagtgtggtgaacgacatccagcaccgggtggaagaaaaaatcagcttgccggaagggtatcatatagaatacggtggacagtttgaaagtgaacaggctgccagccgtaccttgttgctgacttctctgatgagtattgcagtgattttcctgttgctgtacatgcagttccacgatgcggcagagagtggcgttatcctgttgaacctgcctttggccctgattggaggagtctttgccctcttcctgaccacgggtgaagtcagtattcccgccattattggtttcatctcgttgttcggaatcgctacccgtaacggaatgctgcttgtcacacactacaatctgttgcgtgaagaacagcagttgggagtgcgtgaaagtgtggtgcgcggttcgctcgaccgtctgaatccgattctgatgacggctctttcctctgcttttgcattgattccgctggccttgcgcggcgatttgccgggaaatgaaattcagagtccgatggcgaaggtcattctgggaggtctgctgacttccactttcctgaatgcgtttgtcattcctattgtgtacgagttaatgaaccggaagaaaaaccttaaaagaacagaagaatgaaaaaaataggatggatgtggcttgcaggactggcatttgtcagcagcgtgcaggcacagaaaatagaagaagtattgcagtctgtagagcagaataacaaggaactgcaggcggtctttcattctacggaagctgccaagatggaagtacagacgcagaataacctggaagaccccagtgtggagtacagcccgttctttgccaaaggagtagacggaatggccagttctgaactggtggtgacacagggatttgatttcccgaccttgtatgcggcacgcaatcgttccggaaaactgcagaaagatgtgctcgaccgtcagcagcaggcgcttcgccgcgatattctactgcaggccaagaatctgtgtctcgacttgattcgtctgaatcaggaacaggctttgctcatggaacggcagaaaaatgccgatgccctgttgcagttgtttgaaaagcgtttgaaagaaggagatgcgaatgccttggaggtgaataaaatcaagatggaacgcatgaaggtgcagacagaagtggcacagaatcatgcggcacatcgtacggcacttcagcaactgctggcgatgaacggtaacctcccgttggagtttgcagaagaccgttatccggcagtggaagccattcgtgactatcatacattgtataacgaagtaatgatgcaggatgcagaccttcaggcggcagatgcggcttcccgtgcggctgcggagcaggtaagcgtgaacaaacagaactggttgcccaagctggaggtaggttaccgtcgcaatacgtcagtaggtgagaaaagcaacggttttctggtcggaggaagtttcccgatattctctaaccggaagaaactgaagattgccaaggcgcaggccttgagtgccaacctgcaactggacaatacccgcttgcaggtggaagcaagaatacagggacagttcaatgaaatgcagcagcttcaggaagcaatgcaggcctacgatgtgcctttgatgcatcataccctccgcttgctttatgatgccgtgactgccggacaactttcgattattgacttctatgtagaggccgataacgtgtacggcaacctgcaaagttatattacccttgaaaaccagtatcagaaactgatggcggatatttataaaaaccgtctttgataggttctaaaaaaatccgtccccggtaatttatcgctaattaccggggacgattttttagtcaagtcagtttgtcattcaaatcttttctaatggaatattcagggcttttgccactccctttccataattttcatctgctttcatgcagttccgtatatggcgaagcttgatttcttctggaatatctcccatggctcttgccgtattatcgaagagcacctgctgctgggcgggagtcatcagtcggaacagatcgcccggctgagagtagtaatctgaatcatcttctcggtagtcccattggtaagcggctccatcgagttccaacggcggctccttgtattccgtctggtgctgccattctccgtagctgttgggctcatatcctaacgtagacccgtggtttccgtctacgcgcatctgtccgtcccgatgatacatattcaggaaaggacaatgactgcggttgaccggaatctggtgatggttcactcccagtcggtagcgctgtgtatctccgtaagagaacagacgtccttgcagcatacggtcgggtgagaaactgatacccggtactacattggccggattgaatgccgcctgctctacatccgcgaagtagttttccggattgcggttcagttccatcacgcccacctcaatcaacggatattctttctgcgaccagactttggtcaggtcgaacggattgaacggacagttcttggcctgctcttccgtcattacctgaatgtacatagtccatttggggaagtcgcctttctcaatgctttcatacaaatcgcgctggtggctttcacggtctttggcaatgatggcttctgcttctgcatcggtcaggttcttgataccctgctgcgtatgcaggtggaatttcacccaagtgcgttttccttctgcgttgataagtgagaatgtatggcttccgtatccgtgcatgtggcggtaagaggctggaatacctcggtcgctcatggtgatggttacctgatgcagtgcttcaggtagtaatgtccagaaatcccagttgttgcgtgcgcttcgcatgttggtgcgcgggtcacgttttaccgcatgattcaggtcggggaatttcagcgggtcacgaaggaagaagacgggggtgttgttacctaccaaatcccagttaccttcttctgtatagaatttgatggcgaatccgcgaatatcacgttcggcatctgccgctcctcgttcaccggctacggtagagaaacggacaaacagttctgtttcttttccaatctgtgagaaaatagccgccttggtgtaggctgtaatgtcatgagtgaccgtaaattttccgaaggcaccggagcctttggcgtgcatgcgtcgttccggaatcacttcgcggtcaaagtgtgccagtttctcaagaaaccatacgttttgtaaaagcatcgggcctctccgtcctgcggtggccacattgtggttgtcagctacaggtgctcctgaagcgctggtcagttttttattttccatacgatattacatttataattaataaaaaagggatgtactgataaattggtctaatatctttttgtctgtttctgtcagcaatccgtttttggatttcaggaaaggtatgtgggtgttccgtgaaatcttcaatgttttcttcattttccggtacatactgcctgtcctgaatttatacgtggtaaaaaggagtgtacgatgcggagatatgcgtcctgccatcttccggctgcatgcactccatttcttgtgagggtgctgtccgacgacgaaccagccgcacgtccagcatccggaaataaggaagtctgtctcgttcagcttttgagtgtcaaaatcagaaatcgcactcaggctgacgttcaacccttttgaccagagatacatggctatttctcgtgcgaaaaaggcggtctttcctttgtggctgtaatataagacagtggctttcatcttattggcaacaacatggttcttgggcaatttttgttcactgtatttgaggtttgtgccgagacagttattgtcagccaggcacacattaaactgatgatttttttcatatagcgtttcttttttaacaaagataagcgggatgagaatatttatttatatttgcaaaactcattttttcgataatatccatagataaaaacgataaggacatggaactgcgtcaattgaaatactttaaggaggcctgcgaactacagaacttttcagaggctgcgcgtgtgctgcacatctctcaaagtaccctttcacagcaaatcaaacagctggaagatgagctggatgtgctgctgttcgaccgcatcggcaagcgaattgtacccacagaggctgggctggcttttctgccttatgctgtcagggcaatacgtgatgcggaaaacggaaaacagattattcgcgacctgaaaggtattgaaacgggagtgcttcatgtaggagtgacttacagcatgagtccgttattgattgcagcgttgggattattttccaagacttatcccaaaataaaggtcaatgtcagttttggcacttccgaagagttgttggacagattagaggcaaatcagttggattttgtgttgtcctttaaaccggaaggcgtgtcagagcatatggaaaccatgcctttgttctcttccatgctccgctttattgtgcattgttctcatccgttggccgaattgtcgtccatcaccttgaagcggctttctgaaactcccctgattctgccgggaaaaggatttgccacccgaaaaagaatagacgacctgtgccggaagcatcagttggagctgacggtaggcgtggagatgaatgacgtgcataccatcattcataccttgcgcgaaggctattggggaacgatattgacgcaggcggctgtacggggagaagagaacctggtacaaattccgatactatgtgccgacaaactgacttcacagggctttttgttctgggcacagggagattaccgtaagaaatcggcattggcttttgctgattttctccgaaaagtggcaggaggagaagagagaagctaaataatgataagatgtaaaaaagacaggttcctgtttctcttaatccgttctgaattattaactttgtcggtcgataaaaactaaaacagaaacacagcgctatgccattaaatttacccgataaactgcccgcaattgatttgctgaaggaggagaatattttcgttatcgataattctcgtgccagctcacaggatattcgtccgctgaaaattgtggtgctgaacctgatgcccatcaagattactacagaaaccgatttgattcgtttgctttcgaactctcctcttcagatagaggtgagcctgatgaagctgaaaagtcatacgtcaaaaaatacgccggtggaacacatgaaagctttctaccgtgattttgaactgatgaagaatgagaagttcgacggaatgattattacgggtgcgccggtagaacatctcgattttgaggatgtaaattattgggatgaaatcacggagattttcgaatggacccgtacgcatgtgacttctactttttatatctgctgggcagcacaggcgggattgtattatcattatggcattccgaaatatccgctggaaaagaaaatgttcggaatttttgaacatcatatctgcgacggattccagcatttacctattttccgtgggtttgacgatgtgttttatgtaccgcacagccgtcatacggaagtccgtcgggaagacatcgagaagtgtgaaggcttgcaggtgatttcggaatcggccgactcaggtgtacacattgtgatggctcgcggcggacgtgagtttttcgtgaccggacattccgaatattctccttatactttggacacggagtatcgccgtgacctggataagggacttcctattgaaatgcctcgaaactattatcgtgaggacaatccggagaaaggaccgctggtacgttggcgaagtgtggccaacctcttgttctccaattggttgaactattatgtatatcaggaaactccttacgacatcaatcagataaaataatgctcagacaacgtcctatcgaactgcttgctccggcaaagaacttggagtgtggaatggaagccattaatcatggtgccgatgcggtgtatattggtgcacctcgttttggtgcgcgtgcagctgccggaaattctctggaagacattgaagccctggtgcgttacgcacatttgtatcgggtgcgtatttacgtgactgtcaatacaatcttgaaagatgaggaattggcagaaacggagaaaatgatttgggatttgtaccggattggggtggatgccttgattgtgcaggatatggggattacccgtctgaatcttcctccgattcctttgcatgccagtacgcagatggacaaccgcactccgcaaaaagtaaaattcctggctgaggctggtttccgtcaggtggtgttggctcgtgaactgacgctggatgaaattgcaaagattcatgcagcttgtccggaaacaccgctggaagtgtttgtacacggagccttgtgtgtaagctatagcggacaatgttatgtcagccaggcttgctttggccgtagtgccaaccggggagagtgtgcacagttctgtcgcctgagttttgatatggtagacgccgacgggaaaatgattgcccggggcaaacatctgttgtccttgaaagatatgaatcagagcgagaacctggaagccttgctggatgccggtgcttcttcactgaaaatagaaggacgtttgaaggatgtggcctatgtaaagaatgtgacggcttactatcgccagaaactggatgcgatattcaaacgccgcaaagaatatatacgtgcttcttccggcacggtccggctggcttttcgtccgcaattggacaagagtttcagcaggggctttaccgattatttcctgcacggacgtacaccggatattttctccttccatacgccaaagtcgctaggtgaggaaatgggggtggtgaaggaagtacgcggcaactattttaccgtggcaggtgtcaaacctttcagtaacggtgacggactttgttatctggatgaggcgggaaaactgcatggattccgggtaaatcgcgtagaaaacaataaactttatccgcaggaaatgccacgccttcgaccgaagaccaagctttaccgtaactttgaccaggagtttgaacgagtgatgcagaagaaatcggcagagcgaaagatggccgtggccatggcattggaagaaaacaatttcggatttacactgactttgaccgatgaggacgataatagcatcagcgtgacgttgccgtacgaaaaagcaccggcccgtacaccccaggctgaaaacctgagaaatcagttgggcaagttgggaaatacgccttttgaactggaacgtttggatatttctttatcgggcgactggtttattccttcgtcagtgcttgcagatttacgtcgtacggcagtggagaaactgctggaggctcgtcgtatcaactatccgcaggaaagagtccgtttcccgaaaacagttcatgcctttccggcaggcgaactgacctatttaggtaatgtgatgaacggcaaggcgcaggctttctaccatgaccatggagtgaagcgcgtggagccggcttttgaaaaggaagcacaggctgatgcggtgttgatgttctgcaagcattgcctgcgttatagcatgggatggtgtccggtgcatcataaggtgaagtcgccttatcgtgagccgtattatctggtaagtacggacggacgacgtttccgccttgattttgactgtaaggtttgtcagatgaaagtctcattggataatcgggcatcttcatgaagcacttacgatattttctgggcatactctttctgttgctgtgtatgacggcctgtcattaccgcaccaccttgtcttcggctgtgaagaacggttcggaagactcggttgccgtgtcggtacagaaagaacgcccgtatgcactgaacagcaattttcgtgtgacagctgatacgctctggttgcgtctgcttccgttgctcgactctattccggtaagggaaggagatgaactggtggtggctgaaatatcgctgcgcacggaaatgcaggatgactctgtgtgggtgaaggtggcacgcgaccaggaaaccataggctggattccggaacatcagcttttgacgcacattgtccctgtagacccgatatcacgttgcatccacttgttcagtaattcacacaccttaccgttctttctggtattggcagtgttcttcctttgctttgtgtaccgtgccgtacggcgcaagcagataaaactcatctggctgaacgacatagacagtgtgttccccattacgttgtcatggttgcttgtggcagctgctacactttataacagcatgcagcattttgtgccggaaacctgggagcggtattattatgacccgtccctgaatccgttcgacctgccttttgtattagggttgtttgtgctcagtgtgttctttattttgctgttaggagtcgctttgctggatgatttgtttcatcagacctcttttgaagtagccttcttctatctgctgggactggcttcctattgcatatttctttatatcttctttacttatttatgggtgtacctggcttatgtgggctttatcggatataccttgtggtgtattcgtcagctcaggaaatcgcacggttatccatacgcctgtggttcttgtggcgcaaaaatgagatcgaaaggcatttgcccgcactgtggcgcattgaatgagtaagaatcggcagaattttgtaattttgcattttccaaaatcaaaaatcttaaaacgtaccaaatatgattagtatagatggactgaccgtagaattcggagggaccaccttgttcagtgacctgaactttcagattaacgagaaagaccgtatcgccctgatgggtaaaaatggtgccggaaaatcgacacttcttaaaattttggcaggcgttcggcagcccacccgtggaaaagtgacggcaccgaaggactgtgtgattgcctatctgccccagcacctgatgacggaggatggccgtacggtgtttgaagaagcctctcaggcgtttgcccatttgaaagaaatggaagaagagatagagcggatgaacaacgaactggccactcgtacggattatgagagtgactcctatatggctttaatcgagaaagtggcagccatgagcgagaagttctatgccatcgacatgacgcattttgaagaagatgtggagaaggctttgctgggactgggattcttgcgggaagactttaaccgtccgaccagtgatttcagtggaggatggcgtatgcgtatcgaactggccaagctgttgctgcagaatccggacgtccttttgctggatgagcctaccaaccacctggacattgaatctatccagtggctggaagattttctgattaacagtgccaaggccgtggtagtcatcagtcacgaccgtaagtttgtcgataatattaccacacgtactattgaagtcacgatggggcgcatctatgattataaggtgaactattctcagtatcttgtattgcggaaggaacgccgtgagcaacagatgaagcagtatgaggaacagcagaaaatgattcaggaaaccaaggactttatcgaacgcttcaagggtacatacagcaagacgcttcaggtacagagccgtgtgaagatgctggagaaactggaactgatagaggtggacgaagaagatacttcggccttgcgtttgaagtttcctccctctccgcgtagtggaaactatccggttatcatggaaggagtcggtaaaacatacggcgatcatgtagtctttaaaaatgccaatctgaccattgagagaggagataaggtggcattcgtcggaaagaacggagaaggaaagtctactttggtgaaatgtatcatgaatgaaatagatcatgaaggtacgctgacgttggggcataacgtacaaatcggatactttgcacagaaccaggcatccttgctggatgaaaatctgacggtgttccagactattgacgatgtagccaaaggtgaaatccgtaataaaatcagagacctgctgggagcattcatgtttggtagtccggaggcttccatgaaaaaggtaaaagtgttgtcaggaggagaacgtacccgtctggcgatgataaagcttttattagagccggtcaacctgttgattttggacgagccgaccaatcacctggacatgaaaacaaaagatattctgaagcaggcactggtagatttcgacggcacactgattgtcgtatctcacgaccgtgacttcctggatgggcttgtgacgaaagtatatgaattcggaaaccagcgtgtgaaagaacatttgtgtggcatttatgaattcctggagacgaaaaaaatggaaaacttgcaggaactggagcgtaaaaatgcctgaaatcacccttttttagagaaaaaacagggatttgagaaaaaagttcccaaatgttttgcaggtttaaaataagttactacctttgcactcgcaatcgggaaatgaccgatgcggcaaaggattgattcgctagctcagcaggtagagcataacacttttaatgttggggtcctgggttcgagccccaggcggatcactcagagaaaagcggttatcttgaaaaagataatcgcttttttcgtgtttgtatgatgctataaatgtacttttgggtcaacgtaaaaacgggtcaacgtaaaaacctgagggcttcattgtttaggcataaattttagtcagtctgaacaaaaagaaagccgccggtgttgtgcggcggcttttgtacataatgtaaagtttagttaagccctttgtatgatttacgtgcggcttcttcccttgttaaaaaggggggattctgtaaaggagttatgtcatatcaacaagcggaagggtgaaattgttcatccattgtattaaaaaatatgtttataaaaaagcttgataatgacttcccgttttttttctgtacttttgcacccgaaaatcataacaactaaataacatacatacagaatgggtggttttttcggaacagtctctaaggctgaatgcgtgaccgatttattttacggtacggattataattcacatttaggaacgaaacgcgccggaatggcgacatacgccgaaggcgagggtttcatacgttcgattcacaatctggagagttcttattttcgcacgaagttcgagagtgaacttcctaaattcaagggaaaggcaggaatcggtgtcatcagtgatacggatccgcaaccgatgatgattaattctcatctggggcgttttgccattgtaacggtagcgaagattaacaacatggacgaactggtgcaggaattgttgagcaacaatatgcacttctcggagatgagcatgggaaaaaccaaccctacggagctggtagcattgcttattgtgcaaggaaaggattttgtggatggtattgaaaatgtattcaacaaaatcaagggttcctgctctatgctgattctgactgaggacggtatcatcgtggctcgtgacaagtggggacgtacgccaattatcattggaaagaaggatggcgcatacgctgccaccagcgaatcaagcagtttgccgaacctggattttgaaatcgacaaatatgtaggaccgggtgaaattctgcgcatgcgtgctgacggtcttgaacagcttcgcaaaccgaatgagaagatgcagatctgctctttcttgtgggtgtattatggtttccctgtttcttgttatgaaggtaagaacgtggaagaggttcgttttatgagcggatacaagatgggacagacggatgagtctgaagtggactgtgcctgcggtatccctgattcgggggtaggtatggctttgggatatgcagaaggtaagggaattccttatcatcgtgctatagccaagtacactccgacctggcccagaagctttactccgagcaaccagaacatgcgttcgctggtagctaagatgaagttgattcctaaccgtgccatgctgcagggaaagcgtctgttgttctgcgatgattctatcgttcgtggtactcagcttcgtgacaatgtgaacattctttacgattacggagcaaaggaggtacacatgcgtattgcttgtccgccgctgatttacggatgtcctttcattggctttacttcttctaagggtgatatggaattgattacccgtcgtatcatcaaggaaatcgagggtgatgaaaatgccaaactcgacaaatacgctactacagattctccggaatacaaggaactggtagaacgtattcgtgcccgtttcggattgacttcattgaagttcaatacgctggaaaccttgattgaagctattggcttgccgaagtgcaaagtttgtacacattgcttcgatggctccagctgtttctgatgaatattgctgaatataaatatagaaagggaggttcaaacgaacctcccttttttatatatagaaactctttgaaattctctttggtgaagagggatgaatgtcggtgtgcttttttagaacgcttcggtcatgttgaaataaaacagattctgcttgttggtgaaatcgcgtcctaaatccaggcggacattcatgcggggctgtacctctatgcgaagtcctaatccggcattaggaagcactccttctatttttccgggagtaggtcccataaagccacatcctccccaggcaacgaagcccagacgattgattactcttttaatccagttgctctggtcggtattgaacatctggcgatattcggccagtgccacgtgcgaagatttatcgcggtattgtcccatgtaatatcctcgtaagtcgaaaggagtaccactcagtacgtacttattcagcggaagattgtgtccgaaagagtgcttgctctgtaccgtccatgccactacctttcgtttcccgacgctcttgtattgtctgtaatccagttccagatgggagaaattagagtagctgcctaagaatttttggtatatcagtcctctcaggtcgaagtagagccctttgtaagggttggccggtacatcgcgtgtgtcgtaagtaagcaggaaacctactccggaactgaaatccttgtagccgtcggcggtacctcctgcacgtttgtagtcaggctgttccaccaggtacttggccggatccatgatgtggtcataggtaatgtcaatctgtggacctgcaaagaagttactttctcccagacggaaaaggaaccacggattaatctgtatgccgctgtagcgatactggctggtcgtatcgcttcgtacataattcttattggtatcgtatcccaccccatagaagttttcctgggtattcttgaatgtaaactgtccgaagatacggaagcggtcgttcttgaagaaaagctgtggcttgactaccagatttagtcccccgttgaacatgaaagctacggaagccgggataaccgaacggcgcatggtggtatctttcgggttcatgcggaacgtcatcagggcgcttccgcctatcagcagaccaaagtctggagtataactcgggcctcccaatatgttatagtgaaaattgcgggctgcttttttctgttttttgagctctttctccgtctgttgctggcgtaacaggctgtcttgaggagattcttgtgcatttcctgctatgatgaacaggcaatagatgcaaatgagtaagtattttttcatgcgacaaaattacaaaaaagggccgaatctgattgggcttattttaagagtttttggattcccttgtctttttaacttaaaaggcagactggtgtctgaattttcgccgtaagtaggtaaatcatccttgcgttctgataaaaaatggtaagtcttttggtcattctctgggtattttttacttttacagaagtaagatatttgtaaataataaagtgatatgacagtaattgaacgctttttaaagtatgtgacttttgatacgcagtcggatgaatcgaccggtgtcactccgagtacgccgaagcagatggtatttgcgcaatacctgaaaacggagctggaggaactgggattgaaagatatttccttggatgaaaacgggtatttgtttgccacacttccttcgaatgtgaaccatgaggttccggtagtcggctttattgctcacatggataccagtcccgatatgagcggagagaatgtgaaaccgcgcatcgttgagaaatacgatggaaaggatattcctctatgtgcggaagagaatatcattctgtctcctgctaatttcccggaactgctggatcatgtaggtgaggatttgattgtgaccgacggacataccttgctgggagcggacgataaggccggaattgcagaaattgtaggtgcggtggcttatctgattgcacatccggaaatcaagcatggtgacatccgtatcggttttaatccggatgaagaaatcggtctgggagctcacaagtttgatgtagagaaattcggtgcgaaatgggcttataccatggacgggggagaagtcggcgaactggaatttgagaatttcaatgccgcagctgcaaagattcgggtaaagggacgcaatgtacacccgggatatgcaaagaacaagatgattaactctttgttggtggccaatgaatatgcttctttgttgcctgcaaatgaaacaccgggtactacagaaggatacgaaggcttttaccatttgattggtatggaaggtgaagtggaaaatacggtgctttcatatattgttcgcgaccatgaccgtgagaagtttgaagcacgtaagcaggctttgctgaactatgctgcacagttgaacgagaagtacggagagggtacggttaccgtagagctgaaagaccagtactataacatgcgccagcaggtggaaccgttgatgcatatcattgatatagcttttgcagcaatgcaggaagctggggtgactccgaaagtaaaagcaattcgtggaggtacggacggtgcgcaactttcattcaaaggacttccgtgtccgaatatctttgccggcggattgaatttccacggacgttatgagtttgttcctgtacagtctatcgagaaagccatgaacgtggtagtgaagattgcggaacttactgctaaaagatactgctaattatacaacggttgcgggtctgccttgctgaggtcgggctcgcaacttatttatcaaccttaatatataccttatgaaaacaactccatttaccgagaaacatattgcactcggagccaagatgcatgagtttgcgggttacaacatgccgattgaatattctggaattattgatgaacatctcacggtctgccattcggtaggtgttttcgatgtatctcacatgggtgaattttgggtaaaaggccctcatgcactcgaatttattcaggaagtgacttccaataacgctgctgtacttacaccgggcaaggtgcagtacacttgttttcctaatgaaaccggaggaattgtagacgacctgttggtgtatgcatacgaaccggagaaatacatgctggtggtcaatgcagcgaatatcgaaaaggactggaactggtgtgtggctcataatcgggtaggggcagaactggagaattcttccgaccgtatggcacagctggccattcagggacctaaggcttgcgaaacgcttcagaaactgacttccgtagatttgtcatctattccttattatacattcaaagtaggcgagtttgccggagttccgaatgtgattctttccaataccggatacaccggagcaggtggctttgaattatatttctatccggaagtagccatgaaaatttgggatgcaattttcgaagcaggtcaggaatttggcatcaagccgattggtttgggagctcgcgatacattgcgtttggaaatgggtttctgtctgtacggaaatgacatcacggatgaaacttctccgttggaagccggattgggttggattaccaagtttgtggagggtaagaactttactaatcgtgcagccttggagaaacaaaaagcagaaggtgtcagccggaaattagtaggttttgaaatgattgaccgtggaattccccgtcatggctatgcgttgctgaatgaggcaggagagcctatcggtcaggtcacttcaggaaccatgtcgcctatgcgtaagataggtatcggtatgggatacgtgaagactgaatacagtaagccggggacagagatttatctggacaaccgtggaagaaaactgaaagcgcaggtagtgaaacctcctttccggaaatagcaagaaaaggatacgaaaaaaaagcctgtcgaaagacaggcttttttcatgagcggaagacgggactcaaacccgcgaccctcagcttggaaggctaatgctctatcaactgagctacttccgcaaatttgcggtgggcaaggatggattcgaaccaccgaaggcgtaagccagcagatttacagtctgccccatttggccactctggtacttgcccaacaatattttaaaaagagcggaagacggggctcaaacccgcgaccctcagcttggaaggctaatgctctatcaactgagctacttccgcaatttttagtgggcaaagatggattcgaaccaccgaaggcgtaagccagcagatttacagtctgccccatttggccactctggtatttgcccgtccgcaatcaagatttagtgcttttctcaattgcgatgcaaaggtacgattatttttttaacttgcaaataaaatcaatcatttttattgctgtaattgcacattcgtcacctttatttcctaatttccctccggcacggtcttctgcctgctgcatgttattggttgtgatgaggccgtaaatgactggtgtatcggtagttgcattcagttctgtgataccttgggtggctccggcacacacatagtcaaaatgaggcgtatcgccacgtactacgcagcctaatgcgatgactgcatctacttttccgctttttacgagctgtgatgagccgaaagtcagttcgaagctgcccggaacgtaatataccaggatgttttcattctttgccccgtgttttttcaatgtgttgactgctccttcaagcaaagctcctgtaatgttatgattccattcagacactacgataccaaagcgcatctgtgaggcatcgggtacggagttaaagtcgtaatctgaaagattgtgataagctgtagccatattgtttgtctttttaagtttgtatgttaaagaaaaaagccggaccgaaaaacctcggtccggcctgaatgatacttatactaatagaagtatgtttcttgtggtttatttcaaagaagcacgttcgatgtacttatcgatatccattgcctgatatgagttaccgtatttgttcttaacctgcttgtaagcttctacggcttctgcattctttccttgtttttccagaatttgtccagcctgaatcaggaaaatcgggctaattgacaagctgttggcacggtcagctgctttcagcaaaatagcagcagccttgtcaagctgtccagtctgtgcatagcagttgcccagagcgcccattactgaaggagcaaccagtaaatcatcaccgctgaatttatccagatacttgatagcatcttcgtatttacccaactgtgcatagcaaagtcctgcgtatgcgtttgccaggtttcctgcatctgtaccgctgaactcgtctgccagtttcacaaaacctgcatatcccagactgtcacctttcaaggcaacttcaaagttatcagctccgaagtactgttcacctttgaagatagcttctgaagctttcagctcattcggctcagaaatgaaatgtttgtatccgaggaaacctccgacgataactactagagcaactactgctcccaaaagtacattcttgtttttaatcaggaatgcttctgaagtgctgagcgcttcgtctacattcaacgggtcattagtgtgtttttgttcagtcatttgatatttgttttttattatttttctaatccacgtatttggacagcaaaagtagttgatttatgtgtataaatgaaatttgcgggcagtttttttaatcaatcttgcttttattgttaattttgtatcccaaatagtgattgtttttatgtggcttaaacgcatttcgatattaaactataagaatctggaacaggccgagctggctttttcccgcaagatgaactgcatcatcggaaaaaacgggatgggaaagaccaacctgatggatgctgtgtattatctgtctttctgtaagagtgcaaccaatcccattgattctcagaatatacggcacgaacaggacttttttgtgctgcaaggtttttatgaaactgaaggtggtgatccggaagaagtgtattgcgggttgaagcgtcggcagaagaagcagttcaagcggaataagaaagaatatacccgtttgtccgatcacatcggattgattcctttagtgatggtttctccggctgatacgttgcttattgctggggggagtgaggaaagaagacgcttcatggacgtggtgatttcgcagttcgaccgggaatatctggatgcgctgattcgctacaacaaggccttggtgcagcgtaatacgttgctgaaagcggaactggagcccgacgaagaactgatgaacgtatgggaagagatgatggcttctacgggtgaagtggtattccgcaaacgtcagcagtttatcgaagagtttattccgattttccagtcatactattcttatatatcccaaaaccaggaggaggtaaagctttcttaccagtcgcatgcggcagagggtgatttgcttgccttactgcgtgccaaccgtcagcgtgaccgggtgatggggtattccttgaaaggcattcataaggatgatttgattatgcagctaggagaattccctatgaagcgggaaggttctcaagggcagaacaaaacgtatctgattgctctcaagttggcacagtttgaatttttgaagcgtactggaagcggtacgactcctttgattcttctggatgatattttcgacaagctggatgcgcttcgtgtagagcagattgtcaagttagtggcaggagataatttcggacagatttttattaccgataccaaccgtgaccatctggaccgtatcttgaaaaagatagagggcgattacaagctgtttgaggtggaaaacggagaagtgtccgaacggaaggagtcttatgaagcggaataacgcagaacagattggcgatgtgctccggcagtttctccgccagcaaggactggagactcccttgaatgaatatcgtctggtagatgcctggaaagatgtggtgggaccagtcattactcgttacaccacgaatctttttattaaaaaccaggtactttatgtcagcctttcttcttccgtgattcgtcaggaactgatgatgggacgtgaaatgctgattcgtaacctgaatgcccaggtcggctctcaggttattgtgaatattgtgttccgctgaatacgcagccttgttccgtccatacttcgtccatgggcaggtctgtggcttctacgggaatatgtggaagcagttggagttggaagcacactcctatgcgataggattgcagcttggtcaaagcgcggtcgtagtatccttttccccgtcctaaccggttgcctgagcggtcgaaggccacaccaggaataatactcaactctatttcatgcagattttctaccaggctgccggtgggctcttcgatgccgaaagcaccagcttgtaatgaatcctccccttcataataccggaattccagttcctctcctttgacaaggggaagtacgatgcgcttgtatggatgccagcgcttgatgaattcgtgagtctgtacctcatcgggcagtgagtgatagagcaggagagtatgtgcctgtaaaaacaatggatggccctccagcttttgaaataagctggaagaccattcagttttttgagcaacggaataattccgtttttgttgtgcgatgtatcgtcgcaattcctttttatccatgaagtatcatttcttgttgtcggttgttgcctgaggagccggagcctgagggaaagattcacctttttccagaatttctacggctttcagtacggtcttgtccgattcattcaggtattccacgtatgcttccatacccagcatgttatagataatgtttccgtacaagctcatttcgaacaagcggcgtgacttcatcatcaggttgttacggcgtttcaagccttttttctccgcccatgcggcaaacttgttcagcaggttttgtcctttcagataagcttccatcttttccggagtatcatatttctgcaaggtactgcgattctggtcggtatagtcgaacgtgtagcggataattagtccgcggttggcagccatgcggaagtacgaggtcatgccggttgtatcctgtggtacgaaaatatcgggcattatacctcctcctccgtataccggacggcccaggcgggtgtgatatacttcagtctcatcctgcttgatgctgtcggcagagaagaactcaccgtgttcataacgggtgagcaaatccagttcgtattctgattctttccctttttcgtaaggtttctgtatgcagcgtccggatggggtatagtagcgtgcaatggtcagtcggatggccgaaccgtcgctgaattcaatgggctgctgtaccagaccttttccgaaagaacggcgtcctacgatggtaccgcggtcattgtcctggatggctccggcaaagatttcgctggcagaagccgaaccttcgtccaccagtaccacaagcggcatcttctggttgcttcctgttccgttggagttatagtcttcgcgcggcgacttgcgtccttgggtgtagacaatcagacggttgttaggcaagaactcgttgaccatctggatggcagcagccatgtaacctcccgtatttccacgcaggtcgacaatcagaccttcacagttcttctgattcagtttggccagtgcgataagcagttccggataagtggtttcaccaaacttgttgacttttatgtagcctaccttctcattaatcatataggcggcatcgatactcttcaccggaatgtttccacggataacggtgaaatgaagcaagtccttttcgcccggacgataaacgcccagtttcaccttgctgcctttttcacctttcaggcgtttcatggcttcactgtttgtcacaatcttgccgacaaaagcagaatcatctacttctacaatacggtcgcctgccatcaaacccactttttccgagggaccgccctgaatgacgctgtttacatgaatggtatcgttctgaatggtaaactggataccgataccgctgaaactacctttcaaatcggcgtttacagcctccaggtccttggccggaatataagaagaatgcgggtcgagttccgaaagaatctgcggcatggcttcttccaccagttcgcccatgtttaccgtatctacatactggtcgtcgataatgcgcaacaacgcattcagcttgttggatgaagtgttgatgatgcccagcttgtttcctgagaaatggttggcgtagaatgtgccgatggcgatgcccgcaatcaggcagatggccaacaggaacgggataaagcgtgtgttattgtttttcatgttatttattcattggggttaagatatacaacttcaatattggctcttttcagcaagtccagtccgtcttccaaccgatacttttctgcatataccactcgtttgatgccagcctgaataatcagtttggcacattcgatgcaaggagaagcagtgacatacatggtagctccttcactgttgttgctggagcgggctatcttggtgatggcgttagcttcggcatgaagcacataggggcgggttactccgttctcgtcttcgcatacattctcaaagccggcgggagtaccgttgtaaccatccgaaataatcatcttgtctttgacaatcaatgcgcctacctgccgccgttggcaataggaattttctgcccagattaaggccatgcgcatgtagcgtttgtccagtatttcttgcttatgttctgttggtttcatagtggtatgcttaatcgttgaatcctttaggatagaattgaatataatgattcttgtcgaggttgaacagtttgatggttctggaacttccccgatagaatttagcattgcttatttcgtcataaaaagtcttgtccagtccgctgcggtttccactaggctttaactggatagaaaaactctggtcttctccgttggcactccatgtaccggtaaagctgaaattacttccgttgccttccacggtgccgtcttccttgaaaatgatgttgtagctgtcctgactgtcgttgattttagctacttcatcacgtgtcagtgtggaattgaaattgttgtcatccttccagtcactggtactataggagttgctccagtgccacgtctgtccgctggagaaaatttcgtgtacgttgtctttctgattacatccggtcagtaacaggagtaacgtaaagaaccagtagagtctgaatgttttcatttgtatccttattttataccatttctttttaatagagcttcaatggtcggttcctgaccacggaaacgtttgtataatgtcatcgggtgctcggtacctccttttgacaggatattctcacggaacgaacgagcggtgtcctgattgaagatacctgtttccttgaatacggaaaaagcatcggcatccagtacctcagcccatttgtagctgtaatatccggcagaatatcctcccgacatgatgtgcccaaactgtacgctcatacaagtgtctttcggttgcggaagcaattgtgtacgttgccatgcctctttttcgtaggcttttacatcaccttcgaacttgctctggcgagtgtaccaggccatgtcaaggaatccgaagctgagctggcgcaggcaggcgtatgccacgttgaagttggaagcgtctacgatgcgctgaatcagttcttgcggaatgggttcgcctgtctggtaatgacatgcgaatgtattcaaaaattctttttctatggcaaagttttccatgatttgtgaaggaagctccacaaaatcccaatatacattggttccgctcatgctttggaagcgggtattggcgaacatgccgtgcaatgcgtgtccgaactcatgcaggaaagtattcacctccgagaatgtcagcagggcaggcttgtctttggttgctttagtgaaattcatggtgacggacacatgcggacggctgttgcatccgttgtcgtctatccattgttctttgtagctggtcatccaggcacccgaacgcttgccttcgcggggatggaagtcagtgtagagtacagccaggaaacttccgtcgcggtcgaacacttcatatgcctgtacgtccggatgatataccggaatttccttgttttccttgaaggtgatgccatacaagcgggtagccagcccaaatacaccggcttttacacggctcagttcaaagtaaggtcggagcgcttcttcatccagactgaatttccggtttttcaacttttccgcatagtaagagaagtcccacggcatcagctcgaagtcctcgccttccagttcgcgagccagggcacggatttcttctacttcctgacgggcagtcggtgtataagcctccagcaggtcgttcaacagcttgtacacattctcgctgtgttcggccatgcgttttttcagtacatattcagcgtaattcttgaaacccaacagttgcgccagttccatgcggaggttgaccagctgttccacaatcttcaggttgttgaattcattgtcgtgacagcactgggtgttataagccatgtagagcgtctttctcacttccctcttgtcactgtatttcataaaaggcacgtagcttggatcctgcagagtgattacccagcagccttccttccctttctcgtgtgccgtatgtgcggctgcctctatggcactttccggaagtccggccagttcatcttcggtgtgcagcaccagttcgtagccattggtctctttcaggtgattctgcgagaatttcaacgtcaggctgctcagttccatgctcagctttcggaaagtagccttgtcttcttcagacagattggctccgttgcggacaaagccgtcgtatgatttttccagcagacgacgttcttcaggagtcagctgcagggattctcttttatcgtacactgcttttacgcgggcaaagagctgctcgttgaggctgatgttgttagcatgttcagacagtgccggggtcagcttttctgctatttcttccagcgcgtcgcaggtttccgcactcagcaagttaaaaagcacggtagtgacccggtcgagggctttcccagcatgctccagagctaaaatggtgttctggaaagtcggttcttccggattaccggtgatttgctgaatttcttcgtcctccagtcgcatgccttcccgaacggccggctcgtagtcttcaatccgtatctgctggaaaggagtagtatcgtggagtgtatgatagggttgtaaaaatggattgttcatattgcttcaaataaataaaggttgtaattacgctcagtctttcttgtctaacagctgcaccacttccctcagttcaggaatgctgaaggtgcgccgtcccagctgaatcagtccccggttctgaaggtcgttcagcacgtttgatacgttgatacgggtatcgtcaatcaggcgtgccaaatcttccattcggatggacagttttttcgcgccgtagggagtcatgcagcgcagcagaaggaagttgataatcttgtcgcgcgtttttccgatatgcgcattccacaatttgttgtaaatcacctgactccggttgctcagcatgttcatgtagttcaggttgaacacctcataccggcatagctcattgagaatgtatgatttgtcaatgttcagtgtgttgacctccgtaaccgccgtgtaagaagccgtgaagtaagggcgcataccaaacagagaataaggctcaatcacattcgggcttttgaaattttcccaaagtgtatatttgtgagtcttgtcattggattctatctgtacttctccatccagcacgaaaataagttgattgcatggagtgtcttgtcttaccaggcagcttccaggttcatatttattgaagtgaatttttactttttccagaatgtcagtgaagtcaaatttcgacataccctgaaatagaggcagctgtaaaagcttgtcgtacattgtcaattccatttctcgttaactttattaagttatcttttaacatacaaagttaagtatatttccctactgaaagtatcgtccgataataccttttatcttttttattctttcttacagtctgataatgtttgttctttccttgcaagtgtgtagaaaaatcataactttgcagtaataattttggatatagctatgagtggattagattttcagcagtttctgagtgcctttatcgttcttttcgccgtgattgacatcattggttccattcccattattctggacctgaaacaaaaagggcggtccgtgaatgcccttaaagccactctcattgcttttgcgcttctgataggattcttttatgcaggcgacatgatgttgcgtctgtttcaagtggacatcgcttcgtttgcggtggctggtgcgtttgtcattttcctgatgtcgctggaaatgattctggatattgaaattttcaagaatacaggtcctatcaaagaagctacgctggtgcctttggtttttcctttgctggcaggtgccggtgcgtttaccaccctgctttcattgcgggcggaatatgcgccaattaacattgtactggccttgatactcaatatggtatgggtgttcatcgtcttgaaactgaccgaccgcattgagcgtatgttgggaaaaggaggtatttacgtaatccgtaagtttttcggtatcatcttgttggctatctcagcccgcttgtttacggcaaacattacttcacttatcgagcagttccaggccctgaaatgagatataccctgaaaagggtattgggcatttgggaggccggtggtatatttgccgttaaaaaaagaaagatatgaatatagcagcgttgatttcgggaggagtggacagtgcggtagccgtgcacctgttgtgtgaacaaggatacaagcccgatttgttttacataaaaatcggtatggatacagatgacggactaacctgtacggcggaggaagacattgaactggcttctgccactgcacgtaagtatggcctttcttttcatattgtcgatttgcagcaggcttattgggacaatgtggtggcttatacggtggacagggtgcgtcgtgggctgactcccaatccggacgtgatgtgcaacaagctgataaaattcggctgttttgaccgggaggccggacagggttacgataagattgccacggggcattatgcttctacactggatatagacggatatacatggctggctacagccaaagacccggtgaaagatcagaccgatttcctggctcagattgattacctgcaggtgtcacgcctgatatttcccttgggaggttttctcaaggaagaagtgcgggatatggcattgaaagcttctttacccagtgcccgacgaaaagacagccagggcatctgtttcctgggaaagataaattacaatgattttatccgccgtttcttgggagaacgtccgggaccggtcgtagaactggaaaccggaaaggttatcggacagcaccgcggatactggtttcataccattggccagcgtaaaggactgggactgggcggtggtccgtggtttgtggtagacaagaatgtggaagataacattatctatgtgtcgcatggatatgatacagaaaagcagttcggacattccttctgtgtaaaggattttcattttatcaccttgaatccatggaaagaacaggaaactgaaatttgtttcaagatacgtcacacggatacctttcagactggaaaagtgtgctttgccgaagacggaacgctgcaggtttccagtgaggaaccgatacagggcattgcgcccggacaattcggggtgatttatgacaaagatgctcgtttgtgcataggtagtggtgagattcgagcaaagatttattaaaggcagaaagggtaactatgcgaatttcttttcaactgaatgcggcatctcctttgcaaataaaggatttttttcgcaagctggaggttcctgtggaactgaccgtacagggtacttaccgtggggaaactcattattattttcatcgtccggagcattccaccacttcgtttgtcatttccgacgacatgcatggcaaaattgtgataggcatggacggactgtcttcatacgatgactataaattctttccttacctgattgatacgctgggcttgcatttgaacgggcatagtccgaaactgatgtcgcgggaagatgggaagacttacagcgtatatgaaaggctgggtgcgcaatggatagaagactgtatcggagaggagatagcctcgctgaaggtgatactgtctgtcattccccgctgttacctggagcttccgaaaaacggaatccactatgtttctctggaacagttgaaaagatatggggtgaatcttcattcttccacttcacgcatttatggttacatacaatacctacttcggaaaggctggctgttagaagcgactaaggaagagtttctggccgaccggatggcctatgcgatggacgtggagattgatgtgccgcaacatgtgtccatcggacgtgtcaaatcatggcagacagacggtacagaaacctgggaaagtttttcgcgggaagatgtggatatgctgctggagctaggaaaagagtatcgtgaaggaacgcccgtagacggggtggtattgaatgatattggtaccttgtatcaggaaggggtaggggtattccccgacggctatcaggcagagttctggtttaaggaagctgtccgtcagggagatttgacctatgcttcggccaacctgggcgatttgtaccggaaaggatgcggtacgttgcccgtgtcacttccacaagcttttgaggcttatcgtcattcgtccgacccttatgctttctatcgcatcggacaggggtacgaggaaggttgggcaggagtgccggatttacacctggccatgttctggtataagaaggcagctcaagccgggcatcatctggctctcaaacggcttgctcgcgagtgatttttcggccttggaaaaacgcccttgcgtttgaagtaaaatgtacttgcgttttaactgaaacgcacttacgttttatcttaaatgcacttgcgttttgagtcaaacgtccttgcgttttggaggaagcacaaggacgcctgagaatgtttgctttctgggggttaagcgagttgcagaaagtctgcgatttcttccggattttccaccaacaggtcaggctgaaatgcctctaattcgtttttcggacggaatccccagcatacgcctatggtagtcactcctgcattaagtcctgtttgcatgtctactcctgaatcaccgatgtagaccacctcctctttctgtatgccacttattcctatgatttcatgaatgacttgcgggtcgggcttagttggtacgttttcccgctgtccgaatacggctgtaaaatggatggagggaaagtattggcggataagtttctctgtcgcttcctgatacttgttggaagcaacggctacctgaatgtgttgctcctgaagttgggtgagcagttgctcaataccggggtaggggcgacttaaatctgcattgtgcaggttgtagtaaggtacaaattgggaacgtatgcgcagcacattctccggtgtcctttccgattcaggaagagctctttcgaacagcttgttgatgccgtttcccacgaaaaaacgataagcgtccgtgtcatgtgtgggataaccgaactgattcagcgcgtaattagtagccgctgccaggtcggcaatggtgtttagtaaagttccgtccaggtcaaaaattacaagtcttttcatatcgcgttagtctttggtgtaaatggattccactcccgtttcctggcattcagcccccatgggaggattctgtttgaacaaggctattttgatttccgtgatttgtgggaaatcgtgaaacagtcgtccggcaatgcgctggatgacatgctccagcagctgggaagggattttcatttcttctttcacggcctcgaacacttcagcatagttgatggtatagttcaggtcgtcggtttgggaagcccggctgaagtcggttttcaaccgcaggttgagggtgtattcggcacctaccttgttttcctgtggaagtaccccgtggaaagcgaaaagcttcagtcccttcaaatgaatatacatgtcactttgtttcatcttttttatgaataagagaggcatgaatcgtatgattactgaatttcagaaacccgtacgattcatgcctgcgcatttataaaatatgtatttcgtcggcgattatccgcaacgtgaagaaccgcatgtcttacaaatcagacagccttcctgatataccagtgtttcatggccgcagttcgggcatttcacgcctttggcctcggtaccatcctgtacgtatttcttcagtgctctttccacaccgtttttccaggtgttgatgttttcactgtcgagttgcagagaacctaccagtttgataacctgttcgataggcattctccagcggagtactcctgaaatcagtttggcgtagttccagtattccttgttgaacttttcagaaaggccttcaatggtcatcttatagccacgcttgttttcgaactggaagtcataatgcttggttccgtcctcatcgtagctcttgatgatacgtccgctggtgacagatttcggtaatacgataccttcttcatcatcctgcagaccggtaaagatttcgtaaggtcttccgtcgagcaagcctacgaatgccacccatttttccttgttgttctggaatcgtactacatcagcttccagcactttcgggcgtacctctaccacctgaggcggtttgcaacggcattcttcctcttcttctttcttgtcttttttcttggtagaaatcagcactccggcacgtgaaccgtcacggtataccgtacatcccttacatcctgaacgccatgcttccacatacaactggttgacgaggtcttcgcttacgttgttgggcaggttgatggtcacactgatagagtggtccacccatttctggatacgtccttgcatcttcactttcatcagccagtccacatcgtttgaggtggctctgtaatagggtgattttgctaccagctcgtcaatctcttcctgcgtgtaacgtttgtccggatcgtatccgttgattttcatccaggtgaggaatttgtggtggaataccacgtattcttcgaatgcatctcctgtttcgtctacaaagtctacgtgtacattcgcatcgttcgggtttactttgcggcggcgtttgtacacaggcataaataccggttcgataccggaagtagtctgtgtcatcaagctggtagttcctgtcggagcaatggtcaagcaggcaatgtttcttctaccgtattttttcatttcttcgtacagttccgggtcagcttctttcaggcggttgatgaacgggttgttcttttcacgttctgcgtcgtagatttcgaaagcaccacgttctttggccatgtttacagatgaacggtaagcctccaatgcgattgtcttgtgaactttctcagagaattcagtagcttcttccgtaccataacgcaatcccatagctgccagcatgtcaccttctgcagtgatacctacacccgtacggcgtcccagtcctgatttgtggtaaattttctcccacaagtgacgttcgcttccttttacttccatgctctcagggtcagagtcaatcttttcaaggatgcgttcaatcttttccaattccagatcgatgatatcatccatgatgcgctgagccagtgctacatgtttcttgaataaatcaaagtcgaagtatgcttccggtgtaaaaggatttactacgtatgagtacaagttgatggccagcaggcggcatgaatcgtacggacacaatggaatttcaccgcatggattggtagataccgtacggaagcctaagtctgcatagcagtcgggcacagattcacggataattgtatcccagaacaatacacccggttcggcagatttccatgcgttgtgtacgatttttttccatagagctgacgcatctatttcttttgaaaccatcgggttgggtgaatctatcgggtactgctgggtataaggctttccttctacagcagcttgcatgaattcgtcgtctaattttacagagacgttggctccggttacctttccttcggtcattttggcatcgatgaaagattcagagtccggatgcttgatggatacgctcagcatcagggcaccacggcgtccgtcttgtgctacttcacgggtagaattagaatagcgctccatgaaaggaacaagacccgttgaagtcagagctgagttttttaccggagaacctttcggacggatgtgtgacaagtcatgtcctacaccaccacgtcgcttcatcagctgtacctgctcttcgtcgatgcggataatagctccgtatgagtcagcgcttccgtcaagtccgattacaaagcagtttgataatgaagcaatttggtagtcatttccaattccggtcatcgggcttccctgaggaacgatgtacttgaaatggtcaagcaaatcaaaaagttcttgagaactgagagcattaggatatttagcctctacgcgggctacttcattggcaattcgccaatgcatatcctctggcgatttttcatagatgtttccaaatgagtctttcaccgcgtatttgtttacccaaacacgtgcggccaactcgtctcctttgaaatactccaatgaagcgttgtaggcttcatcgtagctgtacgtttttttttccacggttgttatatgaataagtttgttatcaataaaaataagtaaaattgtagaagtcttgctcttatttctaacaaacgtctgcaaatctaaagatgtttttttaattggcaaaataaaaaagaaataagttattaacaatgtggatggttttctgtttttattttttattgtattgataattagttatttgtgaaatttacaaatctgaaaagttttccaaaatgggaaacatgcttgaaatatacgtgtttcttgcttaagaatgaagtagggatattcaaggattcttgttacctttgtgtagtatcatataaagcctatatattatggaatcaataaagaacagacggaccattcgtaaatacaagcaggatgatgtgcctgccgctttactgaatgaattgttggaggagtctttccgtgcttctacgatgggaaatatgcagctgtatagtgtggtggtaacccgggatgcagaaatgaaatcgcgtttggcgccggctcattttaatcagccaatggttacttcagcccctgtagtgctcactttctgtgccgattttaaccgtttcagtaaatggtgtgaacagcgcaaggcggtaccgggttatgataactttatttctttcttgaatgcggctacggatgcgctgttggtgacacagaacttctgtacgttagcagaggaagccggattgggaatttgctatttgggaactactatttataatccggaccaaattattgatttgttggaactcccagagctggttgttcctgtagcaacgattactgttggttatccggatgagtgccctgaacagccggaccgcttacctgtgcaggggattattcatgaagaaaagtatcaggattacacaccttccatgattgaccagatttatgcttataaggaagcgttgccggagaacaagcattttgtcgaaatcaatcataccgagacattggctcaaatctttacggacatccgctataagaaggctgataatgaatttatgtctgaaggtttgaagaaggtgctgaagcgtcagggatttgataagtgattatagttgatagttgaaagataataaaaatggcggctggaactccagtcgccatttttattatcttgtgcgaagactcatttcaatttcttcgatttctgccttaaatgatttgtctacgtctacctgatctttcacaatcttgcatgcgtgcaatacggtagcatggtctttgtttccgatgagctgaccaattttggaggaagacgtatcggtgtgcttcttagccagatacattgccacttgtctcacctgcactacttcccgtttacgggtcttggtatggatggccgtttcatctatcttgtaatgctcgcatactttggcaatgatatcgcttaccgtcatcggtttgctttctgcgcacttcacagcctttctgacgatgcgttgagccaaatccaagtcgatttcccgtttgaacaaaatagactgtgccaataatgagttgacgataccttccagttcacgtacgctttcgttcacactttctgcgatgtagctgatgacagattccggaatggtcagtccgtcgcgttttatcttattacgcaggatgtttttccgcaattcaatatccggtttttccaattccgctaccagtccccatttgaaacgggtcagcaatcgttcctccattccttgaagcatcacaggagcacggtctgaagtcagaatcagctgttttccgttctggtgaagatggttgaagatatggaagaatgtattctgcgttttggttactccggcaaactcctgaatatcatcaatgatgagcacgtcgatagtttggtagaagctgatgaaatcattgaagtggtttgtacgtactgagtctgtatactgcacctggaaaaggtgagcagatacatacaatacgcgtttttccggatataattccttgatacgggttccgatggcattgataagatgagtcttacccacacctgatggaccgtagatgaataacgggttgaaggtacgtgctggattctgtgctacagtttccgctaccgttctcgaaaattcattgctatttcctttgatgaaattctcaaagttatagttcgggttcaaatgcggatccaaatcctgtggagccggagcttgcagaggattgggtgctttattcccattgtaaacaggagcctgttctggcaatgcagaagaacgtttggttccttctatattaacagtgatatggtttgtcttatctgtcaggatagaatacatcaactccgtgccttcacctatttctttatagatggcggcgcgcagcagtcccacatatttttcttccagatattcatagaagaaagggctggggacgccgattgtcaatgccttttccgtagcttcatattttaaaggtacgataggctcaaaccatgttttaaaagccgtagcatttacattgtctttaatgaaagagaggcaacgattccacaatgcaacggcttggttatgttcaatcatacgtgcgttgttattaataaagcgaaacttctacgcttgcaaatttcgtaatcaaatttcagaaaaacaaatggctttttccttgctttttattttaataaattaaggggttgataaataggaggttacaaagttgttaaattattgataaaatgaatttgacttgctttttagtaatctcttatttttcagttgtttaactttgcctatatgtaaggctacatactactctattttgtcgtttccctttgaaaatcataaggttgcattcttataagaaaatgtatctttagagctttactatttagaatatttctatatagtaacctgttcgtaatgttttatgcttagaaatggtgctctgtttaaggagacaaaaaagaaggcataaactggatatgccttcttttatctgtttgatttatatgtgtttatttatctttctttccgaagagtgagaagtgtacataacgtttcggatgctcttgcaggtctttaagaagtgaggctgcattggcagatgtagcgttaaggttcttatacagtgcatcatcattcaacagcaatccgatagagttatccttgctgcctaacttttcggtcagcaggtgtacattctgaagggtggagtctactttttggaaagtagctgcatagtcaattcctttcaagttttcactgatacctttcaggttttcagtgatagcggttacgttgcttgtcagttgaggaatgtccttgctcatcagcccatggagttgtacgctggttgcattcagtgacgctgtcaacttttctgcgttgtgtagcgtttgttttaatgacgggtcagctaacaactggtttagtgaactcaggatagagtccagcttcggcatcatctgttctaccttcgggagcaagtctttctctgcttttcccaggataccggtattggcagttccttcaatggtatctcccgggttcaggaaggtggttgactcatattgcagcatcatgttcatcttaacggttcccagcatttctgtcaccagttcagctttacttccagtggggatacgtaagtcctgatctacttcaatgcccacaatgacatgtccgggatgctgatggtcgtattgcaagtcgcgtacgatacctattttataaccattggcaaatacagggcttgattgagccagtccattcacatcggtaaagtctacgtaatagtaactttccggtttgaacatgctgattcctttcaggtagttgatgccgaaaaaaagaatcagtaatgctccgattcctgctaatccgatttttacttctttcttcatatatattctttctcttttgttatctgttttgtttgaattctcgtattgcttggttgatgttcatttttaccccatctttaaaggcaataataaacgcatccttaaatttactgtctactttacttcttttcaagcggagtatcttgttgtagtttgtatctgaaccgtatgtgtattttatgatacctttttctttataactgtctacaggagaaagtcctttgaactgtttgctcttgggtgaaagcttacggtcggaagttaatatctgtattttgaatacaggctttcccgcagggctcacttcattgcttcgcgaagcagcttgttttgcgggtgtggtagtcacttctgatgcttctacttctggcgtatctggagtttccattggaggagcagcattttcaacagccatcagtcgggtgcttcccgcaactttttctcctttataattcagaaatgcccgatagatactttgtgccagtgtagaactaccttgctcagacaataggaatgattcttctgtgggattagtgatatatccaagttctatcagcacactgggcatcgatgtggcgcgtagtaccagaaatccggcctgatgtactcctttgttggtacggttggcattccggaaacaccgttgcactgctgttgcgaaattgacactttgtgccatgttcttgtcttgcagaaattcgaatatgatgtaactttctgctgagttcgggttgaatccggcataacgctgtttatagtcatcttcgatgagaattaccgcattttctttcttggctacttccagattctcttctgttcggtgaagaccaagggtataggtttcagtaccgctaaccttgctgcttcttgaagctattgaattggtgtggatagaaataaagaggtcagctttggcgtcattcgcaatttcagcccttctatgcagcggaataaacacatctttttcgcgtgtgtatacaacctttgtgtctggacagttttgtttgatgagccgtcccagttttagagctacactcaagttgatgtttttttccttgcctcttctgcctactgctccagggtcgtgtcccccgtgtccggcgtcaattacgacggtgaattttgtttccgcagcgtatgtctgtggaaacaagctgaaggtcagtaacaagcttgttgcaaaaaacagtatgtggaatattctcttctgcataattaaaataacggggcaaagttaatatttttttgtcgacttgttttctgttgcttcaagaattcttctatagctgtaataattgctataaaaaccgaaaaataagcaggtctttgttttaaaatttctacatttgtgtaaatcgtaaaacagaaaggagtaatttatgacattaattgatggaaaagctgtttcagaacaggtgaaacaggaaattgctgccgaagtggctgagattgtagccaagggagggaagcgtcctcatttagctgccattttagtcggacatgacggaggtagtgaaacttacgtagctgcaaaggtcaaggcttgtgaagtatgcggattcaaatcaactttgattcgctacgagtcagatgtgacagaagaagaacttctggcaaaggtacaggaactgaatgctgatcccgatgtggacggttttatcgtacagcttccgttgcctgctcatatctccgagcaaaaagttattgaaacgatagactatcgtaaagacgtcgacggtttccatcctatcaatgttggacgtttgtcgattggtcttccttgttatatctctgcaacgcctaatggtattatggagctgctgcgtcgttatcagattgagacaaaaggtaagaagtgcgttattttagggcgaagcaacattgtcggaaaaccaatggctatgctgatgatgcagaaagcgtgtccgggggatgccacagtaaccgtatgtcacagccggagcaaggatttggtgaaggaatgtcaggaagccgatattctgatagctgccatgggacaacctaactttgtgacagccgacatggtgaaggaaggagctgttgtgattgatgtaggtaccacacgtgtgcccgatgccactaaaaaatccggttttaaattgacgggtgatgtgaagtttgacgaagtagctccgaagtgctcttacattacgccggtaccgggtggggtaggtcctatgaccattgtttcattgatgaaaaatacgctgttggctgggaaaaaagcaatatattgagaaaatagaagatttttttgaagaaaagtttgcagattcagaaaaatcctctacctttgcatcgcttttgagaaggaagccaacatggtgactatagttcagttggttagagcgtcagattgtggttctgaatgtcgtgggttcgagtcccactagtcaccctttctttaaaagcgatttttcataccaacatggtgactatagttcagttggttagagcgtcagattgtggttctgaatgtcgtgggttcgagtcccactagtcacccgtttaagaattgaaagtcctgcagttttgcgggacttttttatttctctatggttttgtttgtatacaaaaaatgcgctatcagaccttcacaggcggatagcgcaagctacaatacaaaatacaaatacaactaaacgagattttgtgctaaaaattaaagcattcaaagatatgaataaaaattatcttttgttcatgtttgctttaaattttaattatccttaatattcagactattccctgagccatcatggcgtgagccactttcataaatccggcaatgtttgcacccttcacataattgatgtatccatcgctttccttaccgtatttcacgcattgttcatgaatgttgtgcataatcagatgaagcttttcatctacttcctgagcagtccagctcaaatgcatggcgttctgactcatttcaagaccggaagtagctacaccacctgcattgacagcctttccaggagcatacatcatcttatgttcgataaatgcgtcaatagcctccggtgtacatcccatgttggaaatttctcctacgcagagcacttggttcttgatcaggttctgtgcatcctcgccgttcaattcgttctgggtagcacatggcagtgcgatgtctactttcacttcccacggacgacgtcccggtacgaaagtagagccagggaatttttcagcgtatggagccacgatatcgttacccgatgcacgcagttcgagcatatagtcaatcttttctccgctgataccttccgggtcataaatataaccgtccggtccggagatggtaactacctttgctcccaattgagtagctttggtggcagctccccatgccacattaccgaatccggagatggctactgtctttccttttatttcgatgcccttttcgtcgagcatgtgttttacgaaatacaagccgccgaagcccgtagcttccggacgaatcagtgaacctccgaattcaagtcccttgccggtaaatgtacctgtaaattcgcgggtcagtttcttgtacatgccgaacatgtaacctacttcacgtccgcctacaccaatatcaccagccggaacatccatatccggtcctaaatgacgccacaattccagcatgaaagcctggcagaagcgcatgatttctgcattgctcttgccgcgtggagagaaatcagaaccacctttaccgccacccatcggcagggtagtcaaagcattcttgaatgtctgttcaaatcctaggaatttcaagatagacaagttcacggaagcgtggaagcggatacctcccttgtacgggccaatggcattgttgaactgtacgcggtagcctaagtttgtctgcacttcgcctttgtcgtctacccatgtcacacggaatgtgaaaatacggtccggctctaccagccgttcaatgatttttgccttttcaaattcggggtgttgattgtaaatatcttcgatagaaagcaatacttccctgactgcctgaaggtactcagattcacctggatgcttggcttccagtgatgacatgattttgttaatgtccataatcaaataatttaaggtctgacaaaatgaaatattttgtatatgcaaagataggaaaatacctgtatcgtcaaagagttttacccgaaaatttgagcgttggattgaattttgttagttttttatcaactctcaagaaagatttgcaaaaatcgtgtgaaattccgaattttgtttctgtaatataagctttaaaagaagataccatgctcaccaaactaagaattaaactccgtcagctttatttcaaggatacgcagtttgccaacctgatgacaaagcgtatattcaacgtattgttggtggccaatccctacgatgcgttcatgctggaagatgacggtcgcattgacgaaaagattttcaatgaatacatgaacctgagtttgcgctatcctcctcgtttcacgcaggtctctacggcagaagaaacctgggaacagttgcgcaacaccatgttcgacctggtaatctgtatgccgggctctgacaatagcgataccttcgacattgcccgcgatattaaaaaggaatatccgcatcttccgctggtggtattgacacctttctcgcatggtatcaaggaacgaatggaacatgaagacctgagcatctttgagtatgtgttctgctggttgggaaataccgacctgctggtgtccatcatcaagctgatagaagacaagatgaacctggagcatgacatcaaggaagtcggcgtacagatgatcatgttggtggaagattccatccgcttctattcctccgtattgcccaacctctacaagttcgttctccgccagagccaggagtttgctacggaagctttgaacgagcaccagcgtacccttcgtatgcgtggacgtcctaaaatcgtattggcccgttcctatgaggaagccacggaactatataataagtaccagaataacgtgctcggtattatttctgatgcccgtttccctcacgatggtgtcaacgacccgcaggctggtgtaaccttgctgcgtgaagtccgcaaacgcgatccgtttatacctcttattcttcagtcggctgaggaaagcaatcgttgctatgcaccggagctggatgccgtattcattgataagaactccaagaagatgaatatcgaccttcgtgaggcggtgtcagacaactttggctttggtgactttattttccgtgaccctcataccatgaaagaagtggcccgtattcataacctgaaggagctgcagaatgtgatatttgccatccctgccgagtctttcctttatcatatcagccgcaaccatatttcgcgctggctgtattcacgtgccatcttcccggtagccgaattcttgaagcagattacgtgggaatctcttcaggatattgatgcacaccgacagattattttcgaagccatcgtaaaataccgcaagatgaagaatcagggagtggtagccgtgttccagcgcgaccgcttcgaccgttattccaattttgcccgtatcggtgatggttcgttgggaggaaagggacgcggtctggctttcattgacaacatggtaaaacgccatacagagttcgatgagtttgagaatgcctccgtcatgattccgaaaaccgtagtcctctgtaccgatatattcgacgagttcatggactccaaccagttgtaccagatagccctgagcgatgcggccgacgacgtgattcttcgtgccttccttcgtgccaagttgcccgaccggctggtagaggatttctttgctttcttcgatgcggtgaaggcaccgattgccatccgttcctccagtctgttggaagactcccattaccaaccctttgccggaatctattccacttacatgattccctatctggacgataagtacgaaatgctccgtatgttaggcgatgccatcaagggagtgtatgcttccgtatattataaggatagtaaagcctacatgcaggctaccagcaacgtgattgaccaggagaaaatggccgtcatcctgcaggaagtggtcggcacccagtatggcgaccgctattatccggccatttccggagtagcccgttccattaactattatccgattaatgatgaactggccgaagaaggaactgtcagtctggctttgggattaggaaaatacatagtagacggtggattgaccttgcgcgtatgtccgtaccatcctacacaagtacttcagaccagcgaaatggaaattgccttgcgtgaaacacagacccgtttctatgccctcgacttaaagaacttaggacagaacttctcgctcgatgacgggttcaacctgttgaaactccatgtgaaagacgctgaagccgacggagctttgaacttcatcgcttctacctacgatccgtacgacatggtgatacgcgatggtatttatcccggcggccgcaagctgataacctttgccaacatccttcagcacgatgtcttcccgctggcccgcatcttgcagttggcccagaaatacggtcagggcgaaatgcgccgtccggtagaaatcgagtttgccgtcaattttgatgcccgtacgaagagcggcatcttctatctgttgcagatacgtccgatggttgatgtaaaagccggactggatgaagacctgagcgtgattcccgatgaacgtttgttgctcaagagcgaaaactcattgggacacggtgtgatggatgatatacaggatgtgatttatgttaagacagaaggttattccgcttccaataaccagttgatagcttacgacattgagaaactcaaccgtcgtttcctcgatgaagggaaacactacatattggttggccccggacgctggggaagcagtgatacgtggttgggcattccggtgaaatggcccaacatttcggctgcccgtatcatcgtggaagccggactgactaattatcgggtagaccccagtcagggaactcacttcttccaaaatctgacttctttcggggtgggatactttaccatcaatgcctatatgaacgatggtatctacaaccaggccttgctcgacagcatgccggcggtagaagaaaccaaatacctgcgctgggtacggtttgagaaacctttatccgtcaagatggacggaaagaaaaagctcggtgtggtagagctgccggaagactgaccggttttaatcgagaacttatttattcacaggggcaagccttgacttggaaaagtcgggacttgccctaattatttttagcaaaatgaaaaatgtttctatcaaattgaaatttaggagatctgtgaatccagaaaaagaaggttcattgatttaccaattgatttacgaacgtaaggtttgtagaatcacaagtaagtataaaattttcaatcatgaatgggatgaagctacagggcaaatacttttctcctctttagattcatctcgtgacagtcagttgggcatgattcggttcaatgtagactgggagttacatcaactttgtaaaattgtagatacactggctctttcaggtcaggaatggacattttctgatttgacatcacattttaattcgtttattgataaggattccagtgtgtttcattttattcagatgcagatacagcgtaaaaaacagttgggtaaagtccgttccagtgaaacctatcaggctaccctcaatagtttcatgtctttccgttgcggagttgatttgactttcgacatgattgactccgaattgatggaactctatgaagctgaattgcagaaccgtggactgacccgtaataccagttcgttctatttgcgcatactgcgcaccaactacaagctggctgtagaaaaagggttgacccaggattgtcatccttttaagcgagtgtattgtggtatagataagacggtaaagagaagtttgtcttttgcgaaaatcaagcagatcaaagaactggatttatctttgaccccatccttggattttgcccgcgacatgtttcttttcagtttctgtacccgaggcatgtcatttgtagacatggcttatctcaaaaagaaagatttaaagaatggttatcttacttataggcggaaaaaaaccggtcagttgctgaccgttgaatggactcggcagatgcaggatattatagataagtacccgataaatcctacccaatacctgcttcctttaattctgcgtgaagatggtagtgagcggcgccagtatcagaatcagatgatgaagataaacaggcatttaaaagatatagcttctttgattaaattacctgtttctttgtctttgtattatagccgtcatagctgggcaactattgcgcgtgggaaagatattccattatccgtcatcagtgaggcattggggcatgattctgaaatcactacccaaatttacctggattccataaaatcggtggaagttgataaagcgaatcgaaaaatcttgaaagatttgtaagtctttaagaaaaagaatatctcctaagatgagataatattttttttgtaagtggttaattatcagattgtctttgttatttataaatatttctgccgtcaacggaggttgttcgtttctttaaaattattttcttcaattgactataataagaaattcaagcgtgaattcttttaaatgaactgaaaaattctctgtttcacagtgtgggatttgtatttcacagtgtgaaatatatatcccacactgtggtttttatattccacactgtgaaacagagaaaataccattaaacttaaaagaattggcagataaaaaaagaagtatctggaggtgaatttgggaaatgttgccataaaaataaatagtacataaaattatcttaaaaaaacaatttgccaataagataaaagtaataacttaatagttaatataaatttaattttctatctttgcagcagaaatattatctcatcttaggagata
